(19) United States
(12) Patent Application Publication
(10) Pub. No.: US 2024/0180983 A1
(43) Pub. Date: Jun. 6, 2024

(54) ADENOVIRUS ENCODING IL-15

(71) Applicant: Akamis Bio Limited, Abingdon (GB)

(72) Inventors: Brian Robert CHAMPION, Abingdon (GB); Manuela ZONCA, Abingdon (GB)

(21) Appl. No.: 18/546,357

(22) PCT Filed: Feb. 14, 2022
(86) PCT No.: PCT/EP2022/053477

§ 371 Date: Aug. 14, 2023

(30) Foreign Application Priority Data
Feb. 13, 2021 (GB) 2102049.0

(51) Int. Cl. A61K 35/761; A61K 45/06; A61P 35/00; C07K 14/52; C07K 14/54

(52) U.S. Cl. CPC A61K 35/761; A61K 45/06; A61P 35/00; C07K 14/521; C07K 14/5434; C07K 14/5443; C12N 2710/10333

(57) ABSTRACT

A group B adenovirus comprising a sequence of formula 5′ITR—B₁-B_{A}-B₂-B_{X}-B_{B}-B_{Y}-B₃-3′ITR, wherein: BY comprises a sequence -G1-G2ₙ-G3ₘ-G4ₚ-G5_{q}. G1 is a first transgene. G2 is a second transgene. G3 is a third transgene. G4 is a fourth transgene. G5 is a fifth transgene and IL-15 is encoded as a transgene in at least one of said locations, and characterised in that BY also encodes a polypeptide comprising the sushi domain of IL-15R alpha.

[0001] The present disclosure relates to a group B adenovirus encoding IL-15, pharmaceutical compositions comprising the same, use of the virus and/or compositions in treatment, in particular the treatment of cancer. The disclosure also extends to replication of the virus in a host cell and a process of formulating the virus.

### BACKGROUND

[0002] IL-15 is a cytokine that stimulates: CD8 positive, cytotoxic, T cells; NK cells and also NKT cells. It is thought to be critical for the division of T cells and the survival of memory T cells. It is also thought to be important for the activity/survival of NKT cells. There are some data to suggest that expression of IL-15 in the tumor microenvironment is an important factor which correlates with anti-tumor activity/responses. Thus, increasing the levels of IL-15 in the tumor microenvironment has become of interest in the treatment of cancer.

[0003] Perera et al (Proc Natl Acad Sci USA 2001, Apr 24; 98(9): 5146-5151) prepared a live vaccina virus encoding IL-15. Backhaus et al (Viruses 2019, 11, 914) discloses measles viruses encoding IL-12 or IL-15.

[0004] The present inventors prepared group B adenoviruses, particularly EnAd, encoding IL-15 and established that the level of cytokine expression was lower than desirable. Faced with this problem they set about optimising the viral constructs.

[0005] Surprisingly, expression is significantly improved when the group B adenovirus also encodes a polypeptide comprising at least the sushi domain from IL-15R alpha (including encoding the whole extracellular protein) linked or unlinked to the IL-15.

[0006] It can be difficult to measure levels of gene expression of transgenes encoded in oncolytic viruses. However, the present inventors have evidence to suggest that the transgenes encoded in viruses are not only expressed in the tumor microenvironment but the protein products can also be detected in the blood.

[0007] The tumor microenvironment is permissive to infiltration by adenoviruses according to the present disclosure, thereby allowing generous levels of IL-15 to be delivered to the desired location.

### SUMMARY OF THE DISCLOSURE

[0008] The present disclosure is summarised below in the following paragraphs:

1. A group B adenovirus comprising a sequence of formula (I):

5′ITR—B₁-B_{A}-B₂-B_{X}-B_{B}-B_{Y}-B₃-3′ITR (I)
[0009] wherein:
[0010] B₁ is a bond or comprises: E1A, E1B or E1A-E1B;
[0011] B_{A} comprises-E2B-L1-L2-L3-E2A-L4;
[0012] B₂ is a bond or comprises: E3;
[0013] B_{X} is a bond or a DNA sequence comprising: a restriction site, one or more transgenes or both;
[0014] B_{B} comprises L5;
[0015] B_{Y} comprises a sequence -G1-G2ₙ-G3ₘ-G4ₚ-G5_{q},
[0016] wherein G1 is a first transgene, G2 is a second transgene, G3 is a third transgene, G4 is a fourth transgene, G5 is a fifth transgene
[0017] B₃ is a bond or comprises: E4;
[0018] n is 0 or; m is 0 or; p is 0 or 1; q is 0 or 1;
[0019] wherein IL-15 is encoded in a transgene in position selected from G1, G2 G3, G4, G5 and combinations of two or three of the same, characterised in that By also encodes a polypeptide comprising the sushi domain of IL-15R alpha, (for example the sushi domain has a sequence shown in SEQ ID NO: 26).
   2. A group B adenovirus according to paragraph 1 wherein the polypeptide comprises a full-length IL-15R alpha extracellular domain, for example a full length IL-15R alpha including membrane anchored forms thereof (in one embodiment consists of or consists essentially of EC domain).
   3. A group B adenovirus according to paragraph 1 or 2, wherein the polypeptide encoding the sushi domain of IL-15R alpha comprises a transmembrane domain or GPI anchor, for example a transmembrane domain shown in SEQ ID NO: 28, 238, 239, 240, 241, 242.
   4. A group B adenovirus according to any one of paragraphs 1 to 3, wherein the polypeptide is linked to the IL-15.
   5. A group B adenovirus according to any one of paragraphs 1 to 4, wherein the encoded polypeptide is located in a different position to the IL-15 (i.e. is separate [unlinked] from IL-15).
   6. A group B adenovirus according to any one of paragraphs 1 to 5, wherein IL-15 is encoded in position G5.
   7. A group B adenovirus according to any one of paragraphs 1 to 6, wherein IL-15 is encoded a in position G4.
   8. A group B adenovirus according to any one of paragraphs 1 to 7, wherein IL-15 is encoded in position G3.
   9. A group B adenovirus according to any one of paragraphs 1 to 8, where in IL-15 is encoded in position G2.
   10. A group B adenovirus according to any one of paragraphs 1 to 9, wherein IL-15 is encoded in position G1. In one embodiment IL-15 is not encoded in position G1.
   11. A group B adenovirus according to any one of paragraphs 1 to 10, wherein the polypeptide comprising the IL-15R alpha sushi domain is encoded in G5.
   12. A group B adenovirus according to any one of paragraphs 1 to 11, wherein the polypeptide comprising the IL-15R alpha sushi domain is encoded in G4.
   13. A group B adenovirus according to any one of paragraphs 1 to 12, wherein the polypeptide comprising the IL-15R alpha sushi domain is encoded in G3.
   14. A group B adenovirus according to any one of paragraphs 1 to 13, wherein the polypeptide comprising the IL-15R alpha sushi domain is encoded in G2.
   15. A group B adenovirus according to any one of paragraphs 1 to 14, wherein the polypeptide comprising the IL-15R alpha sushi domain is encoded in G1.
   16. A group B adenovirus according to any one of paragraphs 1 to 15, wherein the virus also encodes IL-12, for example where the virus only encodes IL-12 once.
   17. A group B virus according to paragraph 16, wherein the IL-12 is encoded as a single chain fusion protein.
   18. A group B adenovirus according to paragraph 16 or 17, wherein the fusion protein is in the format p40-linker-p35.
   19. A group B adenovirus according to paragraph 18, where in the linker comprises one or more units of Gly₄Ser (G₄S), for example 1, 2, 3, 4, 5 or 6 units, such as 3 units of G4S.
   20. A group B adenovirus according to any one of paragraphs 17 to 19, wherein the IL-12 fusion protein comprises the sequence shown in SEQ ID NO: 115

IWELKKDVYVVELDWYPDAPGEMVVLTCDTPEEDGITWTL
DQSSEVLGSGKTLTIQVKEFGDAGQYTCHKGGEVLSHSLL
LLHKKEDGIWSTDILKDQKEPKNKTFLRCEAKNYSGRFTC
WWLTTISTDLTFSVKSSRGSSDPQGVTCGAATLSAERVRG
DNKEYEYSVECQEDSACPAAEESLPIEVMVDAVHKLKYEN
YTSSFFIRDIIKPDPPKNLQLKPLKNSRQVEVSWEYPDTW
STPHSYFSLTFCVQVQGKSKREKKDRVFTDKTSATVICRK
NASISVRAQDRYYSSSWSEWASVPCSGGGGSGGGGSGGG
GSRNLPVATPDPGMFPCLHHSQNLLRAVSNMLQKARQTL
EFYPCTSEEIDHEDITKDKTSTVEACLPLELTKNESCLNS
RETSFITNGSCLASRKTSFMMALCLSSIYEDLKMYQVEFK
TMNAKLLMDPKRQIFLDQNMLAVIDELMQALNFNSETVPQ
KSSLEEPDFYKTKIKLCILLHAFRIRAVTIDRVMSYLNAS.

21. A group B adenovirus according to any one of paragraphs 16 to 20 wherein the IL-12 is located in position G1, for example only encoded in position G1.
22. A group B adenovirus according to any one of paragraphs 16 to 21, wherein the IL-12 is located in position G2, for example only encoded in position G2.
23. A group B adenovirus according to any one of paragraphs 16 to 22, wherein the IL-12 is encoded in position G3, for example only encoded in position G3.
24. A group B adenovirus according to any one of paragraphs 16 to 23, wherein the IL-12 is encoded in position G4, for example only encoded in position G4. In one embodiment IL-12 is not encoded in position G4.
25. A group B adenovirus according to any one of paragraphs 16 to 24, wherein the IL-12 is encoded in G5, for example only encoded in position G5. In one embodiment IL-12 is not encoded in position G5.
26. A group B adenovirus according to any one of paragraphs 1 to 25, wherein n is 1.
27. A group B adenovirus according to any one of paragraphs 1 to 25, wherein n is 0.
28. A group B adenovirus according to any one of paragraphs 1 to 27, wherein m is 1.
29. A group B adenovirus according to any one of paragraphs 1 to 27, wherein m is 0.
30. A group B adenovirus according to any one of paragraphs 1 to 29, wherein p is 1.
31. A group B adenovirus according to any one of paragraphs 1 to 29, wherein p is 0.
32. A group B adenovirus according to any one of claims 1 to 31, wherein q is 1.
33. A group B adenovirus according to any one of claims 1 to 31 wherein q is 0.
34. A group B adenovirus according to any one of paragraphs 1 to 33, where at least one further cytokine is encoded in By, for example 2 or 3 cytokines are encoded.
35. A group B adenovirus according to paragraph 34, wherein the cytokine or cytokines is/are independently selected from: TNF super family (TNFSF) or TNF receptor superfamily (TNFRSF); TGF-beta superfamily (e.g. BMPs); Colony stimulating factor (CSF) family (e.g. GM-CSF, M-CSF); IL-1 family (e.g. IL-1, IL-18); Common cytokine receptor γ chain (γc) family (e.g. IL-2, IL-7, IL-21); IL-10 family (e.g. IL-24); IL-12 family (e.g. IL-23, IL-27); IL-17 family (e.g. IL-17E); Growth factor families (e.g. VEGF, FGF, IGF, PDGF, NGF, HGF, CTGF, TGF-alpha families); and interferon family (such as interferon type I, interferon type II and interferon type III).
36. A group B adenovirus according to paragraph 34 or 35, wherein the cytokine or cytokines are independently selected from: TNF-alpha, TNF-C, OX40L, CD154, FasL, LIGHT, TL1A, CD70, Siva, CD153, 4-1BB ligand, TRAIL, RANKL, TWEAK, APRIL, BAFF, CAMLG, NGF, BDNF, NT-3, NT-4, GITR ligand, EDA-A, EDA-A2, IFN-α, IFN-β, IFN-ε, IFN-γ, IFN-κ, and IFN-ω, Flt3 ligand, GM-CSF, M-CSF, VEGF-C, IL-1, IL-2, IL-7, IL-10, IL-15, IL-17, IL-18, IL-19, IL-20, IL-21, IL-22, IL-23, IL-24, IL-26, IL-27 IL-28, and IL-29.
37. A group B adenovirus according to any one of paragraphs 34 to 36, wherein the cytokine is IL-18.
38. A group B adenovirus according to any one of paragraphs 1 to 37, wherein By encodes interferon type I, such as interferon-a.
39. A group B adenovirus according to any one of paragraphs 34 to 38, wherein the cytokine is encoded in position G1, for example only encoded in position G1.
40. A group B adenovirus according to any one of paragraphs 34 to 39, wherein the cytokine is encoded in position G2, for example only encoded in G2.
41. A group B adenovirus according to any one of paragraphs 34 to 40, wherein the cytokine is encoded in position G3, for example only encoded in G3.
42. A group B adenovirus according to any one of paragraphs 34 to 41, wherein the cytokine is encoded in position G4, for example only encoded in G4.
43. A group B adenovirus according to any one of paragraphs 34 to 42, wherein the cytokine is encoded in position G5, for example only encoded in G5.
44. A group B adenovirus according to any one of paragraphs 1 to 43, wherein By encodes at least one chemokine, for example 1 chemokine.
45. A group B adenovirus according to paragraph 44, wherein the chemokine is selected from MIP-1 alpha, RANTES, IL-8 (CXCL8), CCL17, CCL19, CCL20, CCL21, CCL22, CXCL9, CXCL10, CXCL11, CXCL13, CXCL12 and CCL2.
46. A group B adenovirus according to paragraphs 44 or 45, wherein the chemokine is CXCL9.
47. A group B adenovirus according to any one of paragraphs 44 to 46, wherein the chemokine is CCL19.
48. A group B adenovirus according to any one of paragraphs 44 to 47, wherein the chemokine is CCL21.
49. A group B adenovirus according to any one of paragraphs 44 to 48, wherein the chemokine is encoded in G1, for example only encoded in G1.
50. A group B adenovirus according to any one of paragraphs 44 to 49, wherein the chemokine is encoded in G2, for example only encoded in G2.
51. A group B adenovirus according to any one of paragraphs 44 to 50, wherein the chemokine is encoded in G3, for example only encoded in G3.
52. A group B adenovirus according to any one of paragraphs 44 to 51, wherein the chemokine is encoded in position G4, for example only encoded in position G4.
53. A group B adenovirus according to any one of paragraphs 44 to 52, wherein the chemokine is encoded in position G5, for example only encoded in position G5.
54. A group B adenovirus according to any one of paragraphs 1 to 53, wherein the one or more transgenes in By are under the control of the major later promoter, for example all the transgenes are under the control of the major late promoter.
55. A group B adenovirus according to paragraph 54, wherein G1 is under the control of the major late promoter.
56. A group B adenovirus according to paragraph 54 or 55, wherein G2 is under the control of the major late promoter.
57. A group B adenovirus according to any one of paragraphs 54 to 56, wherein G3 is under the control of the major late promoter.
58. A group B adenovirus according to any one of paragraph 54 to 57, wherein G4 is under the control of the major late promoter.
59. A group B adenovirus according to any one of paragraphs 54 to 58, wherein G5 is under the control of the major late promoter.
60. A group B adenovirus according to any one of paragraphs 1 to 59, wherein the adenovirus is EnAd or Ad11, such as EnAd.
61. A group B adenovirus according to any one of paragraphs 1 to 60, wherein the adenovirus is replication capable, such as replication competent.
62. A group B adenovirus according to any one of paragraphs 1 to 61, wherein the adenovirus is oncolytic.
63. A composition comprising a group B adenovirus according to any one of paragraphs 1 to 62 and a pharmaceutically acceptable excipient, diluent or carrier.
64. A group B adenovirus according to any one of paragraphs 1 to 62 or a composition according to paragraph 63 for use in treatment, for example the treatment of cancer.
65. Use of a group B adenovirus according to any one of paragraphs 1 to 62 or a composition according to paragraph 63 in the manufacture of a medicament for the treatment of cancer.
66. A method of treating cancer comprising administering a therapeutically effective amount of an adenovirus according to any one of paragraphs 1 to 62 or a composition according to paragraph 63 to a subject in need thereof.

[0020] In one embodiment there is only one gene encoding IL-15 in the virus.

[0021] In one embodiment the leader sequence is employed for IL-15 is the non-native sequence, for example an Ig, CD33 or IL-2 leader sequence. This may optimise the expression.

[0022] In one embodiment there is only one gene encoding a polypeptide comprising the IL-15R alpha Sushi domain.

[0023] In one embodiment the Sushi domain comprises a transmembrane domain or GPI anchor, in particular a native transmembrane domain. In one embodiment the Sushi domain does not comprise a transmembrane domain or GPI anchor i.e. is not membrane anchored when expressed, in particular is expressed in a soluble form).

[0024] Soluble form as employed herein refers to a form that is unlinked, including free from attachment to a membrane and/or other protein. Thus, a soluble form includes a form that can be released, such as secreted from the cell.

[0025] In one embodiment the Sushi domain is unlinked, in particular it is not connected to the IL-15. In one embodiment the native leader sequence is employed for IL-15R alpha.

[0026] In one embodiment there is only one gene encoding IL-12.

[0027] Generally, G1, G2, G3, G4 and G5 represent transgenes, for example separated by suitable regulatory sequences, such as a polynucleotide encoding a 2A peptide.

[0028] The presently disclosed adenovirus may comprise 1, 2, 3, 4 or 5 transgenes at position By. Virtually any “gene” inserted in position By will be considered a transgene because it a non-natural location. Regulatory element are not considered to be “genes” in the context of the present specification.

[0029] The positions G1, G2, G3, G4 and G5 are nominal labels, which are defined relative to each other.

[0030] Thus, where there is only one transgene it will always be labelled G1. When there are two transgenes, they will usually be G1 and G2. When there are three transgenes, they will generally be labelled G1, G2 and G3. When there are four transgenes, they will generally be labelled G1, G2, G3 and G4. When there are five transgenes, they will generally be labelled G1, G2, G3, G4 and G5

[0031] In one embodiment B₁ comprises E1A-E1B.

[0032] In one embodiment B₂ comprises E3.

[0033] In one embodiment B_{X} is a bond.

[0034] In one embodiment B_{X}comprises one or more transgenes.

[0035] In one embodiment B₃ comprises E4.

[0036] In one embodiment one or more (such as all) the transgenes in position By are driven by an endogenous promoter, such as the major late promoter.

[0037] In one embodiment transgene expression, especially transgenes located in position By are NOT driven by an exogenous promoter.

[0038] In one embodiment the virus is replication deficient

[0039] In one embodiment the transmembrane domain comprises a sequence selected from the group comprising SEQ ID NO: 238, 239, 240, 241, 242, see sequence listing and Table 1 in the priority document.

[0040] In one embodiment the order of genes is disclosed in a Figure or an example herein. This order may be used as basis for an amendment to the claims. However, the key factor is the position of the IL-15 and/or sushi domain and/or IL-12 and/or IL-18. Thus, description of features of or more of these elements may be extracted from the Examples, “in isolation” if necessary.

[0041] In one independent aspect there is provided a novel virus, construct or component disclosed herein, for example in the sequence listing, pharmaceutical formulations comprising the same, use of the virus or construct or formulation comprising any one of the same in treatment, particularly in the treatment of cancer, such as a cancer disclosed herein.

[0042] In one embodiment the construct is a polynucleotide, such as a DNA construct, encoding a protein sequence listed in any one of SEQ ID NO: 36 to 73, 167 to 188 and 233 to 235.

[0043] In one embodiment the construct is a DNA cassette independently selected from SEQ ID NO: 116 to 156 and 189 to 210.

[0044] In one embodiment the virus according to the invention is independently selected from SEQ ID NO: 74 to 114 and 211 to 232.

[0045] In one embodiment the virus or construct is or relates to NG-796A, a composition comprising same or use thereof, particularly in therapy.

[0046] In a further independent aspect there is provided a virus encoding IL-15 without a gene encoding the Sushi domain.

[0047] In a further independent aspect there is provided a virus encoding IL-12 as per described herein, with or without a gene encoding IL-15.

[0048] In a further independent aspect there is provided a virus encoding IL-18 as per described herein, with or without a gene encoding IL-15.

[0049] The disclosure also relates to processes of preparing said viruses and compositions.

[0050] The viruses of the present disclosure are advantageous because they express adequate/good levels of IL-15 in vivo. In one embodiment two or more, such as 2, 3, 4 or 5 transgenes encoded by the virus are expressed well. The present inventors have also established that in some instances the relative location of the transgenes (i.e. ordering of the transgenes by reference to each other) in position By affects the stability of the virus and/or expression levels of the transgenes. In some instances, expression of a given transgene was extremely low, especially when the promoter is endogenous, which may reduce the therapeutic effectiveness as the local concentration of the polypeptide is reduced.

[0051] The virus life cycle is very complicated and not well understood, in particular there is a complex splicing mechanism. The latter may be affected by the precise local environment of the transgene and when problems arise, they are not easy to understand the solutions are not predictable. Thus, the present invention provides optimised viruses where problems with expression of individual transgenes, in particular IL-15, have been minimised.

### DETAILED DISCLOSURE

[0052] Group B adenovirus as employed herein refers to an adenovirus designated to group B including 3, 7, 11, 14, 16, 21, 34, 35, 51 and EnAd. The designation is generally assigned based on the viral capsid properties. Therefore, chimeric adenoviruses with capsids of a group B virus are designated to group B.

[0053] In one embodiment the adenoviruses of the present disclosure comprise a subgroup of B viruses, namely, Ad11, in particular Ad11p (the Slobitski strain) and derivatives thereof, such as EnAd.

[0054] In one embodiment the adenoviruses of the present disclosure are subgroup B viruses, namely, Ad11, in particular Ad11p (the Slobitski strain) and derivatives thereof, such as EnAd.

[0055] In one embodiment, the oncolytic virus has a fibre, hexon and penton proteins (such as all the capsid proteins) from the same serotype, for example Ad11, in particular Ad11p, for example found at positions 30812-31789, 18254-21100 and 13682-15367 of the genomic sequence of the latter wherein the nucleotide positions are relative to genbank ID 217307399 (accession number: GC689208 incorporated herein specifically by reference).

[0056] In one embodiment, the adenovirus is enadenotucirev (also known as EnAd and formerly as ColAd1). Enadenotucirev as employed herein refers to the chimeric adenovirus of disclosed as SEQ ID NO: 12 in WO2015/059303 incorporated herein by reference. It is a replication competent oncolytic chimeric adenovirus which has enhanced therapeutic properties compared to wild type adenoviruses (see WO2005/118825 incorporated herein by reference). EnAd has a chimeric E2B region characterised by DNA from Ad11p and Ad3, and deletions in E3/E4. The structural changes in enadenotucirev result in a genome that is approximately 3.5kb smaller than Ad11p thereby providing additional “space” for the insertion of transgenes. Almost all of the E3 region and part of the E4 region is deleted in EnAd. Therefore, it has significant space in the genome to accommodate additional genetic material whilst remaining viable. Furthermore, because EnAd is a subgroup B adenovirus, pre-existing immunity in humans is less common than, for example, Ad5. Other examples of chimeric oncolytic viruses with Ad11 fibre, penton and hexon include OvAd1 and OvAd2 (see WO2008/080003 incorporated by reference). Thus, in one embodiment the adenovirus employed is OvAd1 or OvAd2.

[0057] Oncolytic virus as employed herein refers to a virus with selectivity for cancer cells in that it preferentially kills cancer cells, for example because it preferentially infects cancer cells and/or the virus life cycle is dependent on a gene, such as p53 that is disregulated, for example over-expressed in cancer cells. The selectivity for cancer cells (therapeutic index) can be tested as described in WO2005/118825 incorporated herein by reference. In one embodiment the oncolytic virus preferentially infects cancer cells and goes on to replicate its genome and produce capsid proteins to generate new virus particles, for example as per EnAd.EnAd seems to preferentially infect tumour cells, replicates rapidly in these cells and causes cell lysis. This, in turn, can generate inflammatory immune responses thereby stimulating the body to fight the cancer. Part of the success of EnAd is hypothesised to be related to the fast replication of the virus in tumours in vivo.

[0058] IL-15 is a cytokine, which functions through interacting with a trimeric IL-15 receptor complex which includes the high affinity IL-15R alpha chain, and the common IL-15R beta and gamma chains. In one embodiment the IL-15 is human, for example as disclosed in Uniprot P40933 (incorporated herein specifically by reference) or SEQ ID NO: 23

[0059] IL-15R alpha is a subset of the IL-15 receptor complex. It has a 267 amino acid sequence including a 30 amino acid signal peptide. Thus, the mature protein is 237 amino acids in length. It may be provided as a soluble form (for example just the extracellular domain, such as amino acids 31-205) or as a membrane anchored form (for example including the transmembrane domain, such as amino acids 206 to 228 and optionally the cytoplasmic tail, such as amino acids 229 to 267). The domains of the mature protein include the Sushi domain at the N terminal, a linker region, Pro/Thr rich region (these three regions make up the extracellular domain); the transmembrane domain; and the cytoplasmic domain.

[0060] In the one embodiment the IL-15R alpha or fragment thereof according to the present disclosure is provided as in a soluble form, for example wherein there is no transmembrane domain and no cytoplasmic tail. This soluble form may be encoded as a separate protein from IL-15 or encoded such that the protein is linked to the IL-15 (for example linked as a fusion protein).

[0061] In one embodiment there is provided a membrane anchored form of IL-15R alpha or a fragment thereof as per the disclosure. Membrane anchored forms include a transmembrane domain or GPI anchor. In one embodiment the transmembrane domain is the native sequence, for example about amino acids 176 to 198 of the mature protein. In one embodiment the transmembrane domain is a non-native sequence (i.e. not the transmembrane domain from IL-15R alpha), for example selected from SEQ ID NO: 238, 239, 240, 241, 242.

[0062] The extracellular region of IL-15R alpha is approximately amino acids 1 to 175 of the mature protein.

[0063] Sushi domain as employed herein refers to the N-terminal domain located in the mature protein at amino acids approximately 1 to 65 (31 to 95 of the protein with the leader). This region is characterised by 2 disulphide bonds and, N and O-glycosylation sites.

[0064] The linker region in the mature protein is located at approximately amino acids 66 to 98.

[0065] The Pro/Thr rich region is approximately amino acids 99 to 175 of the mature protein and contains sites for O-glycosylation.

[0066] The transmembrane domain is located at approximately amino acids 176 to 198 of the mature protein.

[0067] The cytoplasmic domain is located at approximately amino acids 199 to 237 of the mature protein.

[0068] Thus, in one embodiment the IL-15R alpha comprises or consists of the Sushi domain, for example provided as a separate protein/polypeptide or linked to the IL-15.

[0069] In one embodiment the IL-15R alpha comprises or consists of the Sushi domain and the linker region, for example amino acids approximately 1 to 98 of the mature protein. In one embodiment this is encoded as a separate protein/polypeptide or linked to the IL-15.

[0070] In one embodiment the IL-15R alpha comprises or consists of the Sushi domain and the Pro/Thr rich region, for example amino acids 1 to 65 and 99 to 175 of the mature protein. In one embodiment this is encoded as a separate protein/polypeptide or linked to the IL-15.

[0071] In one embodiment the IL-15R alpha employed comprises or consists of the Sushi domain, linker domain and the Pro/Thr rich region, for example amino acids 1 to 175 of the mature protein. In one embodiment this is encoded as a separate protein/polypeptide or linked to the IL-15.

[0072] In one embodiment the IL-15R alpha comprises or consists of the Sushi domain, linker region, Pro/Thr rich region and the transmembrane region, for example amino acids 1 to 198 of the mature protein. In one embodiment this is encoded as a separate protein/polypeptide or linked to the IL-15.

[0073] Linked to the IL-15 as employed herein refers to linked via a linker (for example a G₄S linker or a linker disclosed starting on page 30 to 31 of WO2016/174200 SEQ ID NO: 26 to 90 and PPP therein and specifically incorporated by reference herein and may be used as basis for amending the claims: or linked directly via a bond, such as an amide bond. Thus, linked as employed herein generally refers to a genetic fusion protein.

[0074] Thus, unless the context indicates otherwise, linked as employed herein refers to the connection between “two” entities, for example such that the transgene is chimeric and thus appears as one gene encoded in the virus (such that there are regulatory elements separating the two nucleotide fragments) and also the expressed polypeptide in the mature form maintains the “connection”.

[0075] In one embodiment the Sushi domain and the IL-15 are linked, for example with a peptide bond or a peptide linker (e.g 1 to 20 amino acids in length), for example a linker disclosed herein or a G₄S linker (e.g. comprising 1, 2, 3, 4 or 5 units of G₄S).

[0076] In one embodiment the C-terminal of the Sushi domain is linked to the N-terminus of the IL-15. In one embodiment the C terminal of the IL-15 is linked to the N-terminus of the Sushi domain.

[0077] Unlinked as employed herein refers to where two units, such as the IL-15 and IL-15R alpha, are expressed as separate proteins/polypeptides. Thus, unlinked proteins will generally appear as separate transgenes encoded within the virus (such that there is a regulatory element separating the same, for example 2A peptide or the like) and the mature proteins expressed will also generally be separate entities i.e. NOT linked by a co-valent bond. However, separate proteins may assemble as complexes.

[0078] IL-12 as employed herein is a heterodimeric cytokine comprising p35 (encoded by IL-12A see Uniprot P29459) and p40 (encoded by IL-12B see Uniprot P29460). In one embodiment the p35 and p40 are unlinked. In one embodiment p35 and p40 are linked (for example by a linker, such as a linker disclosed herein, or linked by a bond, such as an amide bond).

[0079] The present disclosure also extends to employing variants of proteins and polypeptides disclosed herein wherein 1 to 10% (such as 1, 2, 3, 4, 5, 6, 7, 8, 9 or 10%) of the amino acids are changed or deleted, provided the desired function is retained.

[0080] Protein and polypeptide are generally used interchangeably, unless the context indicates otherwise. To the extent there is a distinction they proteins generally have tertiary structure and polypeptides may not have tertiary structure.

[0081] Generally, “comprising” in the context of polypeptides/proteins means, for example additional amino acids/fragments/polypeptides/protein can be appended provided the desired function is retained.

[0082] “Located in different positions”, as employed herein, refers to the fact that the transgenes are separated by a polynucleotide sequence. In adenoviruses genes can be located on different DNA strands because both strands of the virus are coding. Thus in one embodiment different positions refers to different DNA strands. However, in one embodiment the transgenes are in tandem, essentially encoded within the same strand. In one embodiment different locations are different regions of the virus, including, for example where the genes are in tandem. In one embodiment the genes are within the same region of the virus, including, (for example the genes are in tandem) and the “different position” refers to a sequence for example a regulatory element or transgene sequence that separates the “two positions”.

[0083] In one embodiment 0 transgenes separate the “different positions” and, for example a regulatory element (or elements) separates the two positions. In one embodiment 1 transgene separates the “different positions” (may include regulator elements associated therewith). In one embodiment 2 transgene separates the “different positions” (may include regulator elements associated therewith). In one embodiment 3 transgene separates the “different positions” (may include regulator elements associated therewith).

[0084] Transgene as employed herein refers to a gene that has been inserted into the genome sequence, which is a gene that is unnatural to the virus (exogenous) or not normally found in that particular location in the virus. Examples of transgenes are known in the art and discussed herein.

[0085] For example, the transgene may encode a protein, peptide, RNA molecule, such as an RNA molecule. Other examples of genetic material encoded by a transgene include for example antibodies or binding fragments thereof, chemokines, cytokines, immunmodulators, enzymes (for example capable of converting pro-drug in the active agent) and an RNAi molecule.

[0086] Transgene as employed herein also includes a functional fragment of the gene that is a portion of the gene which when inserted is suitable to perform the function or most of the function of the full-length gene.

[0087] Transgene and coding sequence are used interchangeably herein in the context of inserts into the viral genome, unless the context indicates otherwise. Coding sequence as employed herein means, for example a DNA sequence encoding a functional RNA, peptide, polypeptide or protein. Typically, the coding sequence is cDNA for the transgene that encodes the functional RNA, peptide, polypeptide or protein of interest Functional RNA, peptides, polypeptide and proteins of interest are described below.

[0088] Clearly the virus genome contains coding sequences of DNA. Endogenous (naturally occurring genes) in the genomic sequence of the virus are not considered a transgene, within the context of the present specification unless then have been modified by recombinant techniques such that they are in a non-natural location or in a non-natural environment.

[0089] In one embodiment transgene, as employed herein, refers to a segment of DNA containing a gene or cDNA sequence that has been isolated from one organism and is introduced into a different organism i.e. the virus of the present disclosure. In one embodiment, this non-native segment of DNA may retain the ability to produce functional RNA, peptide, polypeptide or protein.

[0090] Thus, in one embodiment the transgene inserted encodes a human or humanised protein, polypeptide or peptide.

[0091] Functions such as transcription, translation, etc require the gene (transgene) to be operably linked. Thus, generally a transgene or transgenes will be operably linked in the virus genome.

[0092] Operably linked as employed herein refers to transgenes being associated with the necessary regulatory elements to allow the genes to be functional i.e. to allow the genes to be “expressed”using the cellularly machinery once the virus is inside the cell.

[0093] In one or more embodiments, the transgene cassette is arranged as shown in the one or more of the Figures or the examples.

[0094] Transgene cassette as employed herein refers to a DNA sequence encoding one or more transgenes in the form of one or more coding sequences and one or more regulatory elements.

[0095] A transgene cassette may encode one or more monocistronic and/or polycistronic mRNA sequences.

[0096] In one embodiment, the transgene or transgene cassette encodes a monocistronic or polycistronic mRNA, and for example the cassette is suitable for insertion into the adenovirus genome at a location under the control of an endogenous promoter or exogenous promoter or a combination thereof. In particular the transgene cassette(s) is/are located in By under the control of an endogenous promoter, for example the major late promoter.

[0097] Monocistronic mRNA as employed herein refers to an mRNA molecule encoding a single functional RNA, peptide, polypeptide or protein.

[0098] In one embodiment, the transgene cassette encodes monocistronic mRNA.

[0099] In one embodiment the transgene cassette in the context of a cassette encoding monocistronic mRNA means a segment of DNA optionally containing an exogenous promoter (which is a regulatory sequence that will determine where and when the transgene is active) or a splice site (which is a regulatory sequence determining when a mRNA molecule will be cleaved by the spliceosome) a coding sequence (i.e. the transgene), usually derived from the cDNA encoding the protein/polypeptide of interest, optionally containing a polyA signal sequence and a terminator sequence.

[0100] In one embodiment, the transgene cassette may encode one or more polycistronic mRNA sequences.

[0101] Polycistronic mRNA as employed herein refers to an mRNA molecule encoding two or more functional RNA, peptides, polypeptide or proteins or a combination thereof. In one embodiment the transgene cassette encodes a polycistronic mRNA.

[0102] In one embodiment transgene cassette in the context of a cassette encoding polycistronic mRNA includes a segment of DNA optionally containing an exogenous promoter (which is a regulatory sequence that will determine where and when the transgene is active) or a splice site (which is a regulatory sequence determining when a mRNA molecule will be cleaved by the spliceosome) two or more coding sequences (i.e. the transgenes), usually derived from the cDNA for the protein, polypeptide or peptide of interest, for example wherein each coding sequence is separated by either an IRES or a high efficiency 2A peptide. Following the last coding sequence to be transcribed, the cassette may optionally contain a polyA sequence and a terminator sequence.

[0103] In one embodiment, the transgene cassette encodes a monocistronic mRNA followed by a polycistronic mRNA. In another embodiment the transgene cassette a polycistronic mRNA followed by a monocistronic mRNA.

[0104] The IL-15R alpha Sushi domain binds IL-15 with high affinity. Affinity can be measured by techniques such as BIAcore.

[0105] The Major Late Promoter (ML promoter or MLP) as employed herein refers to the adenovirus promoter that controls expression of the “late expressed” genes, such as the L5 gene. The MLP is a “sense strand” promoter. That is, the promoter influences genes that are downstream of the promoter in the 5′-3′ direction. The major late promoter as employed herein refers to the original major late promoter located in the virus genome.

### Structural Elements of Adenoviruses

[0106] As the structure of adenoviruses is, in general, similar the elements below are discussed in terms of the structural elements and the commonly used nomenclature referring thereto, which are known to the skilled person. When an element is referred to herein then we refer to the DNA sequence encoding the element or a DNA sequence encoding the same structural protein of the element in an adenovirus. The latter is relevant because of the redundancy of the DNA code. The viruses' preference for codon usage may need to be considered for optimised results.

[0107] Any structural element from an adenovirus employed in the viruses of the present disclosure may comprise or consist of the natural sequence or may have similarity over the given length of at least 95%, such as 96%, 97%, 98%, 99% or 100%. The original sequence may be modified to omit 10%, 9%, 8%, 7%, 6%, 5%, 4%, 3%, 2% or 1% of the genetic material. The skilled person is aware that when making changes the reading frames of the virus must not be disrupted such that the expression of structural proteins is disrupted.

[0108] In one embodiment the given element is a full-length sequence i.e. the full-length gene.

[0109] In one embodiment the given element is less than a full-length and retains the same or corresponding function as the full-length sequence.

[0110] In one embodiment for a given element which is optional in the constructs of the present disclosure, the DNA sequence may be less than a full-length and have no functionality.

[0111] The structural genes encoding structural or functional proteins of the adenovirus are generally linked by non-coding regions of DNA. Thus, there is some flexibility about where to “cut” the genomic sequence of the structural element of interest (especially non-coding regions thereof) for the purpose of inserting a transgene into the viruses of the present disclosure. Thus, for the purposes of the present specification, the element will be considered a structural element of reference to the extent that it is fit for purpose and does not encode extraneous material. Thus, if appropriate the gene will be associated with suitable non-coding regions, for example as found in the natural structure of the virus.

[0112] Thus, in one embodiment an insert, such as DNA encoding a restriction site and/or transgene, is inserted into a non-coding region of genomic virus DNA, such as an intron or intergenic sequence. Having said this some non-coding regions of adenovirus may have a function, for example in alternative splicing, transcription regulation or translation regulation, and this may need to be taken into consideration.

[0113] The sites identified herein, that are associated with the L5 region (for example between L5 and the E4 region), are suitable for accommodating a variety of DNA sequences encoding complex entities such as RNAi, cytokines, single chain or multimeric proteins, such as antibodies.

[0114] Gene as employed herein refers to coding and optionally any non-coding sequences associated therewith, for example introns and associated exons. In one embodiment a gene comprises or consists of only essential structural components, for example coding region, such as cDNA.

[0115] A discussion relating to specific structural elements of adenoviruses is provided in WO2016/174200 starting at page 33 line 8 to page 35 line 32, explicitly incorporated herein by reference and which may be employed as basis for amendment. If there are any doubts about what text is referred to then the priority document contains the same disclosure and will be employed to confirm the intentions of the drafter.

[0116] In one embodiment B_{X} comprises a buffer sequence. This sequence is an artificial non-coding sequence wherein a DNA sequence, for example comprising a transgene (or transgene cassette), a restriction site or a combination thereof may be inserted therein. This sequence is advantageous because it acts as a buffer in that allows some flexibility on the exact location of the transgene whilst minimising the disruptive effects on virus stability and viability.

[0117] The insert(s) can occur anywhere within a place corresponding to between positions 28192 bp and 28193 bp of the EnAd sequence disclosed in the prior art, such as WO2015/059303.

[0118] Thus, in one embodiment the restriction site or sites allow the DNA in the section to be cut specifically.

[0119] DNA sequence in relation to By as employed herein refers to the DNA sequence in the vicinity of the 3′ end of the L5 gene of B_{B}. In the vicinity of or proximal to the 3′ end of the L5 gene as employed herein refers to: adjacent (contiguous) to the 3′ end of the L5 gene or a non-coding region inherently associated therewith i.e. abutting or contiguous to the 3′ prime end of the L5 gene or a non-coding region inherently associated therewith (i.e. all or part of an non-coding sequence endogenous to L5). Alternatively, in the vicinity of or proximal to may refer to being close the L5 gene, such that there are no coding sequences between the By region and the 3′ end of the L5 gene.

[0120] Thus, in one embodiment By is joined directly to a base of L5 which represents the “end” of a non-coding sequence, or joined directly to a non-coding region naturally associated with L5.

[0121] Inherently and naturally are used interchangeably herein. In one embodiment B_{Y} comprises a buffer sequence. This sequence is advantageous because it acts as a buffer in that it allows some flexibility on the exact location of the transgene whilst minimising the disruptive effects on virus stability and viability.

[0122] E4 as employed herein refers to the DNA sequence encoding part or all of an adenovirus E4 region (i.e. polypeptide/protein region), which may be mutated such that the protein encoded by the E4 gene has conservative or non-conservative amino acid changes, and has the same function as wild-type (the corresponding non-mutated protein); increased function in comparison to wild-type protein; decreased function, such as no function in comparison to wild-type protein or has a new function in comparison to wild-type protein or a combination of the same as appropriate. In one embodiment the E4 region has E4orf4 deleted.

[0123] In one embodiment the E4 region is partially deleted, for example is 95%, 90%, 85%, 80%, 75%, 70%, 65%, 60%, 55%, 50%, 45%, 40%, 35%, 30%, 25%, 20%, 15%, 10% or 5% deleted. In one embodiment the E4 region has the sequence from 32188 bp to 29380 bp of the EnAd sequence disclosed in the prior art, such as WO2015/059303.

[0124] In one embodiment B₃ is a bond, i.e. wherein E4 is absent.

[0125] In one embodiment B₃ has the sequence consisting of from 32188 bp to 29380 bp of the EnAd sequence disclosed in the prior art, such as WO2015/059303.

[0126] As employed herein number ranges are inclusive of the end points.

[0127] The skilled person will appreciate that the elements in the formulas herein, such as formula (I) are contiguous and may embody non-coding DNA sequences as well as the genes and coding DNA sequences (structural features) mentioned herein. In one or more embodiments, the formulas of the present disclosure are attempting to describe a naturally occurring sequence in the adenovirus genome. In this context, it will be clear to the skilled person that the formula is referring to the major elements characterising the relevant section of genome and is not intended to be an exhaustive description of the genomic stretch of DNA.

[0128] E1A, E1B, E3 and E4 as employed herein each independently refer to the wild-type and equivalents thereof, mutated or partially deleted forms of each region as described herein, in particular a wild-type sequence from a known adenovirus.

[0129] “Insert” as employed herein refers to a DNA sequence that is incorporated either at the 5′ end, the 3′ end or within a given DNA sequence reference segment such that it interrupts the reference sequence. The latter is a reference sequence employed as a reference point relative to which the insert is located. An insert can, for example be either at least one restriction site insert, at least one transgene cassette or both. When the sequence is interrupted the virus will still comprise the original sequence, but generally it will be as two fragments sandwiching the insert.

[0130] In one embodiment the transgene or transgene cassette does not comprise a non-biased inserting transposon, such as a TN7 transposon or part thereof. Tn7 transposon as employed herein refers to a non-biased insertion transposon as described in WO2006/060314.

[0131] B_{X} and B_{Y} may independently comprise a restriction site, for example selected from NotI, FseI, AsiSI, SgfI and SbfI, in particular the restriction sites inserted are all different, such as sites specific for NotI and sites specific for FseI located in B_{X} and SgfI and SbfI located in By.

[0132] As discussed above in one embodiment the region B_{X} and/or B_{Y} do not comprise a restriction site. The viruses and constructs of the present disclosure can be prepared without restriction sites, for example using synthetic techniques. These techniques allow a great flexibility in the creation of the viruses and constructs. Furthermore, the present inventors have established that the properties of the viruses and constructs are not diminished when they are prepared by synthetic techniques.

[0133] Regulatory sequences are disclosed in WO2016/174200 page 39 starting at line 15 to page 41 line 13, specifically incorporated explicitly herein by reference and which may be employed as a basis for amendment.

[0134] “High self-cleavage efficiency 2A peptide” or “2A peptide” as employed herein refers to a dividing sequence in a single polypeptide that facilitates the generation of multiple individual separate polypeptides. Suitable 2A peptides include P2A, F2A, E2A and T2A. The present inventors have noted that once a specific DNA sequence encoding a given 2A peptide is used once, the same specific DNA sequence may not be used a second time. However, redundancy in the DNA code may be utilised to generate a DNA sequence that is translated into the same 2A peptide. Thus, using 2A peptides is particularly useful when the cassette encodes polycistronic mRNA because it results in the expression of multiple individual proteins or peptides.

[0135] In one embodiment the encoded P2A peptide employed has the amino acid sequence of SEQ ID NO: 4. In one embodiment the encoded T2A peptide employed has the amino acid sequence of SEQ ID NO: 5. In one embodiment the encoded E2A peptide employed has the amino acid sequence of SEQ ID NO: 6. In one embodiment the encoded F2A peptide employed has the amino acid sequence of SEQ ID NO: 7.

[0136] In one embodiment the regulator of gene expression is a splice acceptor sequence, for example as disclosed herein.

### Formulations

[0137] The present disclosure relates also extends to a pharmaceutical formulation of a virus as described herein.

[0138] In one embodiment there is provided a liquid parenteral formulation, for example for infusion or injection, of a replication capable oncolytic according to the present disclosure wherein the formulation provides a dose in the range of 1×10¹⁰ to 1×10¹⁴ viral particles per volume of dose.

[0139] Parenteral formulation means a formulation designed not to be delivered through the GI tract. Typical parenteral delivery routes include injection, implantation or infusion. In one embodiment the formulation is provided in a form for bolus delivery.

[0140] In one embodiment the parenteral formulation is in the form of an injection. Injection includes intravenous, subcutaneous, intra-tumoural or intramuscular injection. Injection as employed herein means the insertion of liquid into the body via a syringe. In one embodiment, the method of the present disclosure does not involve intra-tumoural injection.

[0141] In one embodiment the parenteral formulation is in the form of an infusion.

[0142] Infusion as employed herein means the administration of fluids at a slower rate by drip, infusion pump, syringe driver or equivalent device. In one embodiment, the infusion is administered over a period in the range of 1.5 minutes to 120 minutes, such as about 3, 4, 5, 6, 7, 8, 9, 10, 11, 12, 13, 14 15, 16, 17, 18, 19 20, 25, 30, 35, 40, 45, 50, 55, 60, 65, 70, 65, 80, 85, 90, 95, 100, 105, 110 or 115 minutes.

[0143] In one embodiment one dose of the formulation less than 100mls, for example 30mls, such as administered by a syringe driver. In one embodiment one dose of the formulation is less than 10 mls, for example 9, 8, 7, 6, 5, 4, 3, 2 or 1 mls. In one embodiment one dose of the formulation is less than 1 ml, such as 0.9, 0.8, 0.7, 0.6, 0.5, 0.4, 0.3, 0.2 or 0.1 mls.

[0144] In one embodiment, the injection is administered as a slow injection, for example over a period of 1.5 to 30 minutes.

[0145] In one embodiment, the formulation is for intravenous (i.v.) administration. This route is particularly effective for delivery of oncolytic virus because it allows rapid access to the majority of the organs and tissue and is particular useful for the treatment of metastases, for example established metastases especially those located in highly vascularised regions such as the liver and lungs.

[0146] Therapeutic formulations typically will be sterile and stable under the conditions of manufacture and storage. The composition can be formulated as a solution, microemulsion, liposome, or other parenteral formulation suitable for administration to a human and may be formulated as a pre-filled device such as a syringe or vial, particular as a single dose.

[0147] The formulation will generally comprise a pharmaceutically acceptable diluent or carrier, for example a non-toxic, isotonic carrier that is compatible with the virus, and in which the virus is stable for the requisite period of time.

[0148] The carrier can be a solvent or dispersion medium containing, for example, water, ethanol, polyol (for example, glycerol, propylene glycol, and liquid polyethylene glycol, and the like), and suitable mixtures thereof. The proper fluidity can be maintained, for example, by the use of a dispersant or surfactant such as lecithin or a non-ionic surfactant such as polysorbate 80 or 40. In dispersions the maintenance of the required particle size may be assisted by the presence of a surfactant. Examples of isotonic agents include sugars, polyalcohols such as mannitol, sorbitol, or sodium chloride in the composition.

[0149] In one embodiment, parenteral formulations employed may comprise one or more of the following a buffer, for example 4-(2-hydroxyethyl)-1-piperazineethanesulfonic acid, a phosphate buffer and/or a Tris buffer, a sugar for example dextrose, mannose, sucrose or similar, a salt such as sodium chloride, magnesium chloride or potassium chloride, a detergent such as a non-ionic surfactant such as briji, PS-80, PS-40 or similar. The formulation may also comprise a preservative such as EDTA or ethanol or a combination of EDTA and ethanol, which are thought to prevent one or more pathways of possible degradation.

[0150] In one embodiment, the formulation will comprise purified adenovirus according to the present disclosure, for example 1×10¹⁰ to 1×10¹⁴ viral particles per dose, such as 1×10¹⁰ to 1×10¹² viral particles per dose. In one embodiment the concentration of virus in the formulation is in the range 2×10⁸ to 2×10¹⁴ vp/mL, such as 2×10¹² vp/ml.

[0151] In one embodiment, the parenteral formulation comprises glycerol.

[0152] In one embodiment, the formulation comprises an adenovirus as described herein, HEPES (N-2-hydroxyethylpiperazine-N′-2-ethanesulfonic acid), glycerol and buffer.

[0153] In one embodiment, the parenteral formulation consists of virus of the disclosure, HEPES for example 5 mM, glycerol for example 5-20% (v/v), hydrochloric acid, for example to adjust the pH into the range 7-8 and water for injection.

[0154] In one embodiment 0.7 mL of virus of the disclosure at a concentration of 2×10¹² vp/mL is formulated in 5 mM HEPES, 20% glycerol with a final pH of 7.8.

[0155] In one embodiment a virus of the present disclosure is formulated as a liquid formulation, comprising:
[0156] a) 15 to 25% v/v glycerol, for example 16, 17, 18, 19, 20, 21% v/v glycerol; and
[0157] b) 0.1 to 1.5% v/v ethanol, for example 0.2-1%, such as 1% v/v ethanol;
[0158] c) a buffer,

[0159] wherein the pH of the formulation is in the range 8.0 to 9.6, for example 8.0, 8.1, 8.2, 8.3, 8.4, 8.5, 8.6, 8.7, 8.8, 8.9, 9.0, 9.1, 9.2, 9.3, 9,4 or 9.5, see for example WO2019/149829 incorporated herein by reference.

[0160] The formulation may further comprises a surfactant, for example polysorbate 20, 40, 60, or 80, such as 0.05-0.15% polysorbate 20, 40, 60, or 80, such as 0.05-0.15% polysorbate 80, such as 0.115% polysorbate 80.

[0161] In one embodiment the formulation further comprises methionine, for example 0.01-0.3 mM, for example 0.1 to 0.3, such as 0.25 mM methionine.

[0162] In one embodiment the formulation further comprises arginine, for example 5 to 20 mM, such as 15 mM arginine.

[0163] In one embodiment the buffer comprises meglumine.

[0164] Thus, in one specific embodiment the liquid formulation comprises:
[0165] a) 15-20% v/v glycerol;
[0166] b) 1-1.5% v/v ethanol;
[0167] c) 0.1-0.2% v/v polysorbate 80;
[0168] d) 0.2-0.3 mM methionine;
[0169] e) 10-20 mM arginine; and
[0170] f) a buffer, such as meglumine;
[0171] wherein the pH of the formulation is at a pH in the range 8.0 to 9.6, such as pH 8.

[0172] A thorough discussion of pharmaceutically acceptable carriers is available in Remington's Pharmaceutical Sciences (Mack Publishing Company, N.J. 1991).

[0173] In one embodiment, the formulation is provided as a formulation for topical administrations including inhalation.

[0174] Suitable inhalable preparations include inhalable powders, metering aerosols containing propellant gases or inhalable solutions free from propellant gases. Inhalable powders according to the disclosure will generally contain an adenovirus as described herein with a physiologically acceptable excipient.

### Treatment

[0175] In a further aspect, the present disclosure extends to a adenovirus or a formulation thereof as described herein for use in treatment, in particular for the treatment of cancer.

[0176] In one embodiment, the method of treatment is for use in the treatment of a tumour, in particular a solid tumour.

[0177] Tumour as employed herein is intended to refer to an abnormal mass of tissue that results from excessive cell division that is uncontrolled and progressive, also called a neoplasm. Tumours may be either benign (not cancerous) or malignant. Tumour encompasses all forms of cancer and metastases. In one embodiment the tumour is not benign.

[0178] In one embodiment, the tumour is a solid tumour. The solid tumour may be localised or metastasised.

[0179] In one embodiment, the tumour is of epithelial origin.

[0180] In one embodiment, the tumour is a malignancy, such as colorectal cancer, hepatoma, prostate cancer, pancreatic cancer, breast cancer, ovarian cancer, thyroid cancer, renal cancer, bladder cancer, head and neck cancer or lung cancer.

[0181] In one embodiment, the tumour is a colorectal malignancy.

[0182] Malignancy as employed herein means cancerous cells.

[0183] In one embodiment, the adenovirus is employed in the treatment or prevention of metastasis.

[0184] In one embodiment, the method or formulation herein is employed in the treatment of drug resistant cancers.

[0185] In one embodiment, the adenovirus is administered in combination with the administration of a further treatment or therapy, in particular a further cancer treatment or therapy.

[0186] In one embodiment, there is provided a virus or formulation according to the present disclosure for use in the manufacture of a medicament for the treatment of cancer, for example a cancer described above.

[0187] In a further aspect, there is provide a method of treating cancer comprising administering a therapeutically effective amount of a virus or formulation according to the present disclosure to a patient in need thereof, for example a human patient.

[0188] In one embodiment, the oncolytic virus or formulation herein is administered in combination with another therapy.

[0189] “In combination” as employed herein is intended to encompass where the oncolytic virus is administered before, concurrently and/or post cancer treatment or therapy.

[0190] Cancer therapy includes surgery, radiation therapy, targeted therapy and/or chemotherapy.

[0191] Cancer treatment as employed herein refers to treatment with a therapeutic compound or biological agent, for example an antibody intended to treat the cancer and/or maintenance therapy thereof.

[0192] In one embodiment, the cancer treatment is selected from any other anti-cancer therapy including a chemotherapeutic agent, a targeted anticancer agent, radiotherapy, radio-isotope therapy, a biological therapeutic, an immunotherapy (such as checkpoint inhibitors of the PD1 signaling pathway, including pembrolizumab, nivolumab, cemiplimab, atezolizumab, avelumab, durvalumab) a further oncolytic virus, a cellular therapy (such as a chimeric antigen receptor cellular therapy) or any combination thereof.

[0193] Thus, in one embodiment the combination therapy comprises a PD-1 inhibitor, for example pembrolizumab, nivolumab, cemiplimab, JTX-4014 (Jounce Therapeutics), spartalizumab, camrelizumab, sintilimab, tislelizumab, toripalimab, dostarlimab, INCMGA00012 (macrogenics), AMP-224 (AstraZeneca/MedImmune and GSK) and AMP-514.

[0194] In one embodiment the combination comprises a PD-L1 inhibitor atezolizumab, avelumab, durvalumab, KN035, CK-301 (Checkpoint Therapeutics), AUNP12 (Pierre Fabre), CA-170 and BMS-986189.

[0195] In one embodiment, the virus of the present disclosure or a formulation thereof may be used as a pre-treatment to the therapy, such as a surgery (neoadjuvant therapy), for example to shrink the tumour, to treat metastasis and/or prevent metastasis or further metastasis. The oncolytic adenovirus may be used after the therapy, such as a surgery (adjuvant therapy), for example to treat metastasis and/or prevent metastasis or further metastasis.

[0196] Concurrently as employed herein is the administration of the additional cancer treatment at the same time or approximately the same time as the oncolytic adenovirus formulation. The treatment may be contained within the same formulation or administered as a separate formulation.

[0197] In one embodiment, the virus is administered in combination with the administration of a chemotherapeutic agent.

[0198] Chemotherapeutic agent as employed herein is intended to refer to specific antineoplastic chemical agents or drugs that are selectively destructive to malignant cells and tissues. For example, alkylating agents, antimetabolites, anthracyclines, plant alkaloids, topoisomerase inhibitors, and other antitumour agents. Other examples of chemotherapy include doxorubicin, 5-fluorouracil (5-FU), paclitaxel, capecitabine, irinotecan, and platins such as cisplatin and oxaliplatin (including combinations of two or more of the same). The preferred dose may be chosen by the practitioner based on the nature of the cancer being treated.

[0199] In one embodiment the therapeutic agent is ganciclovir, which may assist in controlling immune responses and/or tumour vascularisation.

[0200] In one embodiment one or more therapies employed in the method herein are metronomic, that is a continuous or frequent treatment with low doses of anticancer drugs, often given concomitant with other methods of therapy.

[0201] Subgroup B oncolytic adenoviruses, in particular Ad11 and those derived therefrom such as EnAd may be particularly synergistic with chemotherapeutics. Moreover, the immunosuppression that occurs during chemotherapy may allow the oncolytic virus to function with greater efficiency.

[0202] In one embodiment the virus according to the present disclosure or formulation thereof is employed in combination with a cellular therapy, for example a T cell therapy, an NKT cell therapy, NK cell therapy or macrophage cell therapy including transgenic forms thereof (such as chimeric antigen receptor cells, in particular CAR-T cells and CAR-NKT cells).

[0203] Transgenic cells as employed herein refer to engineered cells, for example engineered using recombinant techniques to include non-native polynucleotide(s) that modify the function of the cell i.e the cell is modified to express a synthetic receptor on its surface.

[0204] CAR as employed herein refers to chimeric antigen receptor i.e a synthetic receptor, such as an antibody binding domain coupled to signalling function, such as an intracellular signalling function. CARs are most commonly created by joining heavy and light chain variable regions from a monoclonal antibody. The receptors bind antigen or ligand to which they are specific and stimulate signalling pathways in the transgenic cell.

[0205] First generation CAR-T cells often had intracellular signalling unit based on CD3-zeta. However, second generation CARs generally have costimulatory element, such as CD28 and 4-1B_{B}, CD136, CD137 or CD27 and ICOS built into the intracellular signalling domain (see FIG. 14 herein, for example see U.S. Pat. No. 7,446,190, Dotti et al 2009 (Human Gene Therapy 20: 1229-1239 (November 2009). Finney et al J Immuno. 1998, Sep 15; 161(6): 2791-2797. Finney et al 2004 J Immunol Jan 1, 172(1) 104-113. Milone et al Mol Ther. 2009 August; 17(8): 1453-1464.

[0206] Companies such as ProMab Biotechnologies, Inc make these products commercially available.

[0207] Thus, in one embodiment the CAR comprises a CD3 zeta signalling unit. The following disclose first generation CARs: Irving and Weiss, Cell 1991 Mar 8; 64(5): 891-901. Letourmeur 1991 Oct 15; 88(20) 8905-8909. Romeo, Cell, Vol 68, issue 5, p889-897, Mar. 6, 1992.*

[0208] In one embodiment the CAR comprises a CD28 signalling unit, see for example Maher et al, Nat Biotechnol 2002 Jan; 20(1); 70-75 and Carpenito et al PNAS Mar. 3, 2009 106(9) 3360-3365.*

[0209] In one embodiment the CAR comprises a CD27 signalling unit. The later makes an essential contribution to mature CD4+ and CD8+ T cell function.

[0210] In one embodiment the CAR comprises an ICOS signalling unit, wherein ICOS stands for inducible T-cell co-stimulator.

[0211] In one embodiment the CAR comprises 4 1B_{B}, see for example Imai 2004, Leukemia 18, 676-684.*

[0212] In one embodiment the CAR therapy comprises one co-stimulatory factor.

[0213] In one embodiment the CAR therapy comprises a combination of co-stimulatory factors, for example 2, 3, or 4, such as CD28 and 4-1B_{B}, CD28 and ICOS, CD27 and 4-1B_{B} or CD27 and ICOS.

[0214] Guedan et al Blood 2014, 124(7): 1070-1080, incorporated herein by reference, discloses ICOS based chimeric antigen receptors.* Duong PLoS 2013 May 7;8(5) discloses engineering T cell function using chimeric antigen receptors.*

[0215] Signalling unit as employed herein is element that contribute to the cellular signalling of the CAR.

[0216] Chimeric T cell receptors are disclosed in US2004043401.*

[0217] * The construction features (signalling aspects not specificity) of the CAR disclosed here are incorporated by reference and may be used as the basis for an amendment to the claims.

[0218] The binding domain of the CAR is similar to an antibody and may, for example comprise a scFv, see for example Kuwana et al Biochem Biophys Res Commun. 1987 Dec 31, 149(3); and Eshhar et al Proc Natl Acad Sci USA 1993 Jan 15; 90(2):270-724.* Second generation CARS

[0219] In one embodiment the binding domain of the CAR is specific to a blood antigen, for example CD19, CD30, CD123, FLT, (including combinations such as CD19 and CD20 or CD22) in particular useful in the treatment of a hematological cancer, such as ALL, AML, CLL, DLBCL, BCMA, leukemia and multiple myeloma. Porter et al N Engl J Med 2011; 365: 1937-1939 discloses CAR modified T cells in CLL. Grupp et al N Engl J Med 2013 April 18; 368 (16) 1509-1518 discloses CAR modified T cells for ALL. Maude et al N Engl J Med 2014, 371: 1507-1517 disclosed CAR-T cells for sustained remission of Leukemia. Garfall et al N Engl J Med 2015; 373: 1040-1047 disclosed CART cells against CD19 for multiple myeloma.

[0220] In one embodiment the CAR is specific to a cancer antigen.

[0221] Cancer antigens (also referred to as tumor antigens) are antigens found specifically on cancer cells (i.e. generally not found on healthy cells or highly upregulated on cancer cells) including for example CEA, MUC-1, EpCAM, HER receptors HER1, HER2, HER3, HER4, PEM, A33, G250, carbohydrate antigens Le^{y}, Le^{x}, Le^{b}, PSMA, TAG-72, STEAP1, CD166, CD24, CD44, E-cadherin, SPARC, ErbB2, ErbB3, WT1, MUC1, LMP2, idiotype, HPV E6&E7, EGFRvIII, HER-2/neu, MAGE A3, p53 nonmutant, p53 mutant, NY-ESO-1, GD2, PSMA, PCSA, PSA, MelanA/MART1, Ras mutant, proteinase3 (PR1), bcr-abl, tyrosinase, survivin, PSA, hTERT, particularly WT1, MUC1, HER-2/neu, NY-ESO-1, survivin and hTERT. In one embodiment the CAR binding domain is specific to a cancer antigen. Can

[0222] In one embodiment the CAR binding domain targets aberrant sugars on the surface of cancer cells.

[0223] In one embodiment the CAR is specific to a stromal antigen.

[0224] Stromal antigens as employed herein are antigens only expressed on stromal cells, for example antigens expressed on cancer cells and stromal cells are considered to be cancer antigens in the context of the present specification. Examples of stromal antigens include CD163, CD206, CD68, CD11c, CD11b, CD14, CSF1 receptor, CD15, CD33 and CD66b.

[0225] In one embodiment the CAR binding domain is specific to an antigen selected from the group comprising HER-3, HER-4, CEA, EGFRviii, PSMA, CD20, VEGFR-1, VEGFR-3, c-Met, Lewis A, ROR-1, CD326, CD133, NKG2d, MUC-1, PSCA, PSA, CA-125, Notch and FLT-3.

[0226] In one embodiment the engineered cell encodes at least two entities, for example CD19 CAR and PD-1 siRNA, CD19 TIGIT siRNA, BCMA-CS1, or BCMA-CD33.

[0227] Thus, in on one embodiment the CAR is specific to:
[0228] CD19 (for example CD19-CD28, CD19scFv-CD28-CD3ζ, CD19scFv-4-1BB-CD3ζ, CD19scfv-CD28-4-1BB, CD19scFv-CD28-4-1BB-CD3ζ, or iCas9-T2A-antiCD19scFv-CD28-CD3ζ, CD19FLAG-CD28-CD3ζ or iCas9 HA-T2A-antiCD19scFv-CD28-CD3ζ-GGGS-FLAG, humanised CD19 scFv-TM28-CD28-CD3ζ, CD19 scFv-Beam-TM28-CD28-CD3ζ or humanised CD19 scFv-Beam-TM28-CD28-CD3ζ, CD19 scFv-CD22 scFv-4-1BB-CD3-T2A-tEGFR or, CD19 scFv-TM28-GITR-CD3ζ or CD19 scFv-TM8-GITR-CD3ζ);
[0229] Mesothelin (for example mesothelin scFv-CD28-CD3ζ, mesothelin scFv-4-1B_{B}-CD3ζ, mesothelin scFv-CD28-4-1BB-CD3ζ, mesothelin scFv FLAG-4-1BB-CD3ζ, mesothelin scFV-TM28-CD28-4-1BB-CD3ζ, mesothelin scFv-Beam-TM28-4-1BB-CD3ζ, mesothelin scFv-Beam-CD28-CD3ζ, mesothelin scFv-TM8-4-1BB-CD3ζ, mesothelin scFv-TM28-CD28-CD3ζ);
[0230] VGFR2 (for example VGFR2 scFv-CD28 CD3ζ);
[0231] GPC3 (for example GPC3 scFv-CD28-CD3ζ)
[0232] CD133 (CD133 scFv-CD28-CD3ζ);
[0233] EpCAM (for example EpCAM scFv-CD28-CD3ζ such as a version where Nhel restriction site introduced, N-terminal of scFv amino acid);
[0234] EGFR (for example EGFR scFv-CD28-CD3ζ, EGFR scFv-4-1BB-CD3ζ, EGFR scFv-TM28-GITR-CD3ζ, scFv-TM28-CD3ζ-GITR;
[0235] CD33 (for example CD33 scFv-TM28-CD28-CD3ζ or CD33 scFv-Beam 2-TM28-CD28-CD3ζ);
[0236] CD38 (for example CD38 scFv-TM28-CD28-CD3ζ);
[0237] CD138 (for example CD138 scFv-Beam-TM28-CD28-CD3ζ)
[0238] CD22 (for example CD22 scFv-TM28-CD28 CD3ζ, -CD22 scFv-TM28-4-1BB CD3ζ or CD22 scFV-Beam-TM28-CD28-CD3ζ)
[0239] BCMA (for example BCMA-4-CD28 CD3ζ or humanized, BCMA-4 scFv-TM8-4-1BB-CD3ζ or BCMA-2 scFv-Tm-CD28-CD3ζ)
[0240] HER2 (for example HER2 scFv-CD28-CD3ζ, HER2 scFv-4-1-BB-CD3Z-EGFRt or HER scFV-4-1BB-CD3ζ-GFP)
[0241] CD4 (for example CD4 scFv-Beam-TM28-CD28-CD3ζ)
[0242] ROR-1 (for example ROR-1 scFv TM28-CD28-CD3ζ, ROR-1 scFv TM28-4-1BB-CD3ζ or humanised ROR-1 scFv TM28-4-1BB-CD3ζ)
[0243] CD19&CD22 (for example CD19 scFv CD22 scFv-4-1BB-CD3ζ or CD19 scFv-CD22 scFv-4-1BB-CD3-T2A-RQR8)
[0244] CEA (for example CEA scFv-TM28-CD28 CD3ζ or humanised CEA scFv -TM28-CD28 CD3ζ
[0245] NGFR (for example NGFR scFv-TM28-CD28-CD3ζ)
[0246] MCAM (for example MCAM scFv-TM28-CD28-CD3ζ)
[0247] CD47 (for example CD47 scFv-TM28-Cd28-CD3ζ or humanised CD47 scFv-TM28-CD28-CD3ζ)
[0248] PDL-1(for example PDL-1 scFV-TM28-CD28-CD3ζ)
[0249] CD123 (for example CD123 scFv-TM28-CD28-CD3ζ)
[0250] CD37 (for example CD37 scFv-TM28-CD28-CD3ζ, CD37 scFv-TM28-4-1-BB-CD3ζ
[0251] CS1 (for example CS1 scFv-TM28-CD28-CD3ζ)
[0252] B7H4 (for example B7H4 scFv-TM28-CD28-CD3ζ)
[0253] CD24 (for example CD24 scFv-TM28-CD28-CD3ζ), and
[0254] CD20 (for example CD20 scFv-TM28-CD28-CD3ζ)
[0255] NKG2D such as CYAD-01,
[0256] FLT3, such as AMG 553
[0257] DLL3.

[0258] In one embodiment the CAR is specific to HER-2, for example with a specificity of the CAR employed in the Examples disclosed herein.

[0259] In one embodiment the CAR is provided in a T cell (such as autologous T cells or allogenic T cells, more specifically HLA matched T cells). In one embodiment the CAR-T cell is selected from tisagenlecleucel, axicabtagene ciloleucel, lisocabtagene maraleucel, idecabtagene vicleucel, brexucabtagene autoleucel, JCAR015 (CD19 CAR T from Juno), Descartes-08 (BCMA) and AMG119.

[0260] In one embodiment the immune cells is a phagocytic cell, for example encoding a CAR listed herein, such as CD19 scFv-label-CAR or mesothelin scFv CAR. In one embodiment the phagocytic cell is a macrophage, such as a THP 1 cell),

[0261] In one embodiment the CAR is provided in an NKT cell. The benefit of NKT cell cars, is that they do not require HLA matching with the patient Thus, they can be employed to provide an “off the shelf product”, for example with the specificity listed herein. WO2013/040371 discloses NKT engineered with a CAR and incorporated herein by reference. In one embodiment the NKT cell enc

[0262] In one embodiment the immune cell is an NK cell, see for example Tran et al, J Immunol 1995 Jul, 155(2); 1000-1009 incorporated herein by reference.

[0263] Thus, in one embodiment the immune cell therapy further comprises a transgene (i.e. an engineered gene) encoding a cytokine, for example selected from IL-2, IL-5, IL-7, IL-12 and IL-15.

[0264] Immune cells such as T cells, NKT cells may be activated or have activity sustained by the IL-15 expressed by the virus of the present invention. This may help counteract the anergic/hypoxic microenvironment of tumour. The latter may have the ability to neutralise the killing power of the native cells and even the engineered cellular therapy employed in combination with the present invention. Thus, use of the virus of the present disclosure may trigger several mechanisms for killing cancer, especially when used in combination with cellular therapy.

[0265] Therapeutic dose as employed herein refers to the amount of virus, such as oncolytic adenovirus that is suitable for achieving the intended therapeutic effect when employed in a suitable treatment regimen, for example ameliorates symptoms or conditions of a disease. A dose may be considered a therapeutic dose in the treatment of cancer or metastases when the number of viral particles may be sufficient to result in the following: tumour or metastatic growth is slowed or stopped, or the tumour or metastasis is found to shrink in size, and/or the life span of the patient is extended. Infection of cancer cells after systemic delivery of the viruses of the present disclosure is an indication of a therapeutic dose i.e. it has been delivered to the target cells. Suitable therapeutic doses are generally a balance between therapeutic effect and tolerable toxicity, for example where the side-effect and toxicity are tolerable given the benefit achieved by the therapy.

[0266] In one embodiment, a virus or therapeutic construct according to the present disclosure (including a formulation comprising same) is administered weekly, for example one week 1 the dose is administered on day 1, 3, 5, for example followed by one dose each subsequent week or multiple doses in the second week.

[0267] In one embodiment, a virus or therapeutic construct according to the present disclosure (including a formulation comprising same) is administered bi-weekly or tri-weekly, for example is administered in week 1 one on days 1, 3 and 5, and on week 2 or 3 is also administered on days 1, 3 and 5 thereof. This dosing regimen may be repeated as many times as appropriate.

[0268] In one embodiment the first dose is lower than the subsequent doses, for example the first dose is in the range 1×10¹⁰ to 1×10¹² viral particles and the subsequent doses are in the range 1×10¹¹ to 1×10¹³ viral particles.

[0269] In one embodiment 6 doses are given over a two week period, for example day 1, 3, 5, 8, 10 and 12, such as where each dose may be given+/−1 day, including where the dose on day 1 is lower than the other doses.

[0270] In one embodiment, a virus or therapeutic construct according to the present disclosure (including a formulation comprising same) is administered monthly.

[0271] In one embodiment, the viruses and constructs of the present disclosure are prepared by recombinant techniques. The skilled person will appreciate that the armed adenovirus genome can be manufactured by other technical means, including entirely synthesising the genome or a plasmid comprising part of all of the genome. The skilled person will appreciate that in the event of synthesising the genome the region of insertion may not comprise the restriction site nucleotides as the latter are artefacts following insertion of genes using cloning methods.

[0272] The disclosure herein further extends to an adenovirus of formula (I) or a subformula thereof, obtained or obtainable from inserting a transgene or transgene cassette.

[0273] “Is” as employed herein means comprising.

[0274] In the context of this specification “comprising” is to be interpreted as “including”.

[0275] Embodiments of the invention comprising certain features/elements are also intended to extend to alternative embodiments “consisting” or “consisting essentially” of the relevant elements/features.

[0276] Where technically appropriate, embodiments of the invention may be combined.

[0277] Technical references such as patents and applications are incorporated herein by reference.

[0278] Any embodiments specifically and explicitly recited herein may form the basis of a disclaimer either alone or in combination with one or more further embodiments.

[0279] The background section may be used as basis for an amendment.

[0280] The present application claims priority from GB2102049.0 filed 13 Feb. 2021, incorporated herein by reference especially the sequences, which are explicitly incorporated herein. The priority document may be employed to correct errors in the present specification.

[0281] The present invention is further described by way of illustration only in the following examples, which refer to the accompanying Figures, in which:

### DESCRIPTION OF THE FIGURES

[0282] FIG. 1A shows effect of different combinations of recombinant IL-12, IL15 and IL-18 proteins on IFNg production by cultures of primary breast (T63), colorectal (T64) and kidney (T65) tumour cell preparations.

[0283] FIG. 1B shows expression of the CD25 activation marker on CD4 and CD8 T-cells and NK cells from cultures of primary breast tumour (60) cell preparations treated with different combinations of IL-12, IL15 and IL-18.

[0284] FIG. 1C shows expression of the CD107a marker of activated degranulation on CD4 and CD8 T-cells and NK cells from cultures of primary breast tumour (60) cell preparations treated with different combinations of IL-12, IL15 and IL-18.

[0285] FIG. 1D shows intracellular IFNg expression in CD4 and CD8 T-cells and NK cells from PBMCs treated with different combinations of IL-12, IL15 and IL-18.

[0286] FIG. 2A shows kinetic analysis of PBMC-derived T-cell mediated killing (apoptosis induction) of target cell fibroblasts by a FAP-specific T-cell activator (FAP-TAc) in the presence or absence of combinations of IL-12, IL15 and IL-18.

[0287] FIG. 2B shows enhancement by IFNα of the of PBMC-derived T-cell mediated killing (apoptosis induction) of target cell fibroblasts by a FAP-specific T-cell activator (FAP-TAc) in the presence or absence of combinations of IL-12, IL15 and IL-18.

[0288] FIG. 2C shows kinetic analysis of T-cell mediated killing (apoptosis induction) of target cell fibroblasts by primary tumour-derived lymphocytes (kidney tumour 70) stimulated with a FAP-specific T-cell activator (FAP-TAc) in the presence or absence of combinations of IL-12, IL15 and IL-18.

[0289] FIG. 2D shows the enhancement by IFNα of the T-cell mediated killing (apoptosis induction) of target cell fibroblasts by primary tumour-derived lymphocytes (kidney tumour 70) stimulated with a FAP-specific T-cell activator (FAP-TAc) in the presence or absence of combinations of IL-12, IL15 and IL-18.

[0290] FIG. 2E shows the effect of IL-12 and IL-15 on PBMC-derived NK cell-mediated killing of K562 target tumour cells.

[0291] FIG. 2F shows the effect of IL-12, IL-15 and IFNα on primary tumour-derived NK cell-mediated killing of K562 target tumour cells.

[0292] FIG. 3A shows chemokine stimulated migration of naïve T-cells prepared from PBMCs in culture using recombinant chemokines.

[0293] FIG. 3B shows chemokine stimulated migration of effector T-cells prepared from PBMCs in culture using recombinant chemokines.

[0294] FIG. 3C shows chemokine stimulated migration of CD45+TILS, prepared from a primary breast tumour sample (53), in culture using recombinant chemokines.

[0295] FIG. 3D shows chemokine stimulated migration of CD3+ T-cells and non-T-cells (CD3-) from primary lymph nodes from breast cancer surgery.

[0296] FIG. 3E shows chemokine stimulated migration of monocyte-derived dendritic cells across a Matrigel coated transwell.

[0297] FIG. 3F shows real-time imaging analysis (Incucyte) of CCL19 and CCL21 chemokine stimulated migration of dendritic cells across a Matrigel coated transwell.

[0298] FIG. 4A shows effect of IL-15 with or without IL-12 on primary lymph node T-cell responses to Muc-1 tumour antigen or CEFT peptides measure by IFNg ELISPOT assay.

[0299] FIG. 4B shows the effect of IL-15 with or without IL-12 on primary lymph node T-cell responses to Her2 tumour antigens (HER2-ECD and HER2-ICD) or CEFT peptides measure by IFNg ELISPOT assay.

[0300] FIG. 5A shows a schematic representation of transgene cassettes encoding human IL-12 as separate p35 and p40 proteins or as single chain IL-12 molecules which use a linker to covalently join the p35 and p40 chains.

[0301] FIG. 5B shows the genome replication of NG-701, NG-702 and NG-703 in A549 cells.

[0302] FIG. 5C shows IL-12 p70 protein production by A549 cells infected with NG-701, NG-702 and NG-703

[0303] FIG. 5D shows RT-qPCR analysis of transgene mRNA expression by NG-701, NG-702 and NG-703 inoculated A549 cells.

[0304] FIG. 5E shows IL-12p40 and IL-12p70 production measured by ELISA assay of supernatants from A549 cells inoculated with NG-701 or NG-702.

[0305] FIG. 5F shows functional activity of IL-12 produced by NG-702 or NG-703 inoculated A549 cells assessed with a HEK-Blue cell IL-12 signaling reporter assay.

[0306] FIG. 5G shows the effect of recombinant human IL-12 or supernatants from NG-702 infected A549 cells on CD107a expression by CD4+ T-cells stimulated with anti-CD3 and/or anti-CD28 antibodies.

[0307] FIG. 5H shows the effect of recombinant human IL-12 or supernatants from NG-702 infected A549 cells on CD107a expression by CD8+ T-cells stimulated with anti-CD3 and/or anti-CD28 antibodies.

[0308] FIG. 6 shows a schematic representation of transgene cassettes encoding the IL12p40-Linker-IL12p35 single chain human IL-12 plus one or more other transgenes. In one embodiment these constructs are inserted in position B_{Y}.

[0309] FIG. 7A shows genome replication of EnAd, NG-702, NG-704 and NG-706 in A549 cells.

[0310] FIG. 7B shows IL-12p70 protein levels produced by A549 cells inoculated with NG-707, NG-704 or NG-706.

[0311] FIG. 7C shows IFNa protein levels produced by the same A549 cells treated with NG-704 or NG-706.

[0312] FIG. 7D shows the expression of mRNA for Flt3L, MIP1a, IFNα, CXCL9 and IL-12 transgenes in A549 cells inoculated with NG-707.

[0313] FIG. 7E shows the expression of Flt3L, MIP1a, IFNα, CXCL9 and IL-12 transgene proteins by A549 cells inoculated with NG-707.

[0314] FIG. 7F shows the expression of IFNα, CCL19, IL-18 and IL-12 transgene proteins by A549 cells inoculated with NG-709

[0315] FIG. 7G shows functional IL-12 activity in supernatants of A549 cells inoculated with NG-704, NG-706, NG-707 or NG-709.

[0316] FIG. 7H shows production of IL-12, Flt3L and CCL21 transgene proteins by A549 cells inoculated with NG-708.

[0317] FIG. 7I shows encoded transgene protein production by NG-708 and NG-709 inoculated A549 cells measured by specific ELISAs.

[0318] FIG. 7J shows encoded transgene protein production by A549 cells inoculated with different viruses depicted in FIG. 7A above (1×10⁶ cells).

[0319] FIG. 8A shows production of IL-12 p70 protein by tumour cell preparations from a primary colorectal (68) and a kidney (70) tumour inoculated with NG-702 or NG-704.

[0320] FIG. 8B shows production of IFNg by a primary kidney tumour cell preparation cultured with different combinations of IL-12, IL-15 and IL-18, with or without inoculation with EnAd, NG-702 or NG-704 viruses.

[0321] FIG. 8C shows time course of IL-12 p70 protein production by tumour cell preparations from a kidney (70) and a colorectal (71) primary tumour cell preparations inoculated with NG-707.

[0322] FIG. 8D shows production of IL-12 p70 protein by primary breast tumour cell preparations (66 and 67) inoculated with NG-702, NG-704, NG-707 or NG-709.

[0323] FIG. 8E shows time course of IL-12 p70 protein production by a primary colorectal tumour (75) cell preparation inoculated with NG-707 at two different dose levels.

[0324] FIG. 8F shows time course of IL-12 p70 protein production by a primary colorectal tumour (76) cell preparation inoculated with NG-707 at two different dose levels.

[0325] FIG. 8G shows time course of IL-12 p70 protein production by a primary colorectal tumour (79) cell preparation inoculated with NG-707 at two different dose levels.

[0326] FIG. 8H shows time course of IL-12 p70 protein production by a primary kidney tumour (tumour 70) cell preparation inoculated with NG-707 at two different dose levels.

[0327] FIG. 9A shows schematic representation of transgene cassettes encoding transmembrane or soluble secreted forms of IL-15 receptor alpha sushi domain with or without IL-15.

[0328] FIG. 9B shows production of IL-15 by NG-740 compared to three viruses not expressing an IL-15 receptor alpha form.

[0329] FIG. 9C shows IL-15 production following co transfection of an IL-15 plasmid with either transmembrane form of IL-15 receptor alpha sushi domain (sushi-TM) or a soluble secreted version (sushi).

[0330] FIG. 9D shows functional activity of IL-15 in samples from FIG. 9C.

[0331] FIG. 9E shows IL-15 production by A549 cells inoculated with NG-740 and NG-748 expressing transmembrane or soluble secreted forms of IL-15 receptor alpha sushi domain, respectively

[0332] FIG. 9F shows IL-15 production by primary colorectal tumour cells inoculated with NG-740 and NG-748 expressing transmembrane or soluble secreted forms of IL-15 receptor alpha sushi domain, respectively.

[0333] FIG. 9G shows IFNg production by primary kidney tumour cells treated with NG-748 or NG-702, in presence of different IL-12 or IL-15 respectively.

[0334] FIG. 10A shows schematic representation of transgene cassettes encoding IL-12 and IL-15 together with transmembrane or soluble secreted forms of IL-15 receptor alpha sushi domain.

[0335] FIG. 10B shows IL-12 and IL-15 production by A549 cells treated with the viruses depicted in FIG. 10A, measured by ELISA.

[0336] FIG. 10C shows functional activity of IL-12 and IL-15 from same samples as FIG. 10B.

[0337] FIG. 10D shows IL-12, IL-15 and IFNg production by A549 cells inoculated with different viruses, with PBMCs added to the cultures after 24h.

[0338] FIG. 10E shows IL-12, IL-15 and IFNg production by A549 cells inoculated with different viruses, with purified CD3+T_cells added to the cultures after 24h.

[0339] FIG. 10F shows IFNg production by T-cells cultured in direct contact with, or separated in a transwell format, from A549 cells treated with different viruses.

[0340] FIG. 10G shows IL-15 and IFNg production by A549 cells inoculated with different viruses, with PBMCs or purified T-cells added to the cultures after 24h.

[0341] FIG. 11A shows production of IFNg, IL-12 and IL-15 by primary colorectal tumour cells (tumour 98) 72h following treatment with different viruses.

[0342] FIG. 11B shows production of IFNg by primary colorectal tumour cells (tumour 99) 96h following treatment with different viruses.

[0343] FIG. 12A shows a schematic representation of transgene cassettes encoding IL-12 and IL-15 together with transmembrane or soluble secreted forms of IL-15 receptor alpha sushi domain and a further chemokine transgene (CXCL9 or CCL21).

[0344] FIG. 12B shows the production of IL-12p70, IL-15, CXCL9 and CCL21 by A549 cells treated with different viruses.

[0345] FIG. 12C shows the production of IL-15 by A549 cells treated with different viruses.

[0346] FIG. 12D shows the production of IL-12p70, IL-15 and CXCL9 transgene proteins and IFNg cytokine secretion by primary tumour cells (tumour 105) treated with different viruses.

[0347] FIG. 12E shows the production of IL-12p70, IL-15, CXCL9 and IFNg by primary colorectal tumour cells (tumour 105) treated with different viruses.

[0348] FIG. 12F shows the production of IL-12p70, IL-15, CXCL9 CCL21 and IFNg by primary colorectal tumour cells (tumour 107) treated with different viruses.

[0349] FIG. 12G shows the migration of monocyte-derived dendritic cells stimulated by CCL21 transgene protein in supernatants from A549 cells treated with NG-795A and migration inhibition in the presence of added anti-CCL21 antibody.

[0350] FIG. 12H shows the migration of monocyte-derived dendritic cells stimulated by CCL21 transgene protein in supernatants from A549 cells treated with NG-795A and selective migration inhibition in the presence of added anti-CCL21 antibody.

[0351] FIG. 13 shows the levels of IL-12 p70 in the plasma of human tumour xenograft-bearing mice injected with NG-786A, NG-791A or NG-796A compared with those dosed with EnAd or untreated mice.

[0352] FIG. 14 shows the generic structure of chimeric antigen receptors.

[0353] FIG. 15 shows a graph of the migration of monocyte-derived dendritic cells stimulated by CCL21 transgene protein in supernatants from A549 cells treated with NG-796A and migration inhibition in the presence of added anti-CCL21 antibody.

[0354] FIG. 16A shows the control of A549 tumour xenograft growth by IV dosed NG-704 prior to transfer of Her2-specific CAR-T cells compared to CAR-T alone of CAR-T plus EnAd pre-dosing.

[0355] FIG. 16B shows the control of A549 tumour xenograft growth by IV dosed NG-796A prior to transfer of HER2-specific CAR-T cells compared to CAR-T alone of CAR-T plus EnAd pre-dosing.

[0356] FIG. 16C shows the levels of CCL21 in A549 xenograft tumours following IV dosing with NG-796A or EnAd.

[0357] FIG. 17 shows the levels of IL-12, CCL21, IL-15 and IL-15Ra sushi domain protein in supernatants of A549 cells infected with NG-796A.

[0358] FIG. 18A shows the levels of IL-15 detected in supernatants of A549 cells transfected with pUC-796A or pRES-128 with or without different concentrations of recombinant IL-15Ra sushi domain protein added to the cultures.

[0359] FIG. 18B shows a schematic representation of transgene cassettes in CMV pUC vectors encoding single chain IL-12 (scIL12), CCL21 and IL-15 with (pUC-796A) or without (pRES-128) a sequence encoding secreted IL-15Ra sushi domain

### SEQUENCES

[0360] SEQ ID NO: 1 Short splice acceptor (SSA) DNA sequence -CAGG
[0361] SEQ ID NO: 2 Splice acceptor (SA) DNA sequence
[0362] SEQ ID NO: 3 Splice acceptor DNA sequence
[0363] SEQ ID NO: 4 High efficiency self-cleavable P2A peptide sequence
[0364] SEQ ID NO: 5 High efficiency self-cleavable T2A peptide sequence
[0365] SEQ ID NO: 6 High efficiency self-cleavable E2A peptide sequence
[0366] SEQ ID NO: 7 High efficiency self-cleavable F2A peptide sequence
[0367] SEQ ID NO: 8 Poly adenylation (PA) sequence (SV40 late polyA sequence)
[0368] SEQ ID NO: 9 Human IL-12 p35 protein with signal sequence (IL12p35)
[0369] SEQ ID NO: 10 Human IL-12 p40 protein with signal sequence (IL12p40)
[0370] SEQ ID NO: 11 Human IL-12 p70 single chain protein with a (Gly₄Ser)₃ linker joining the IL12p40 protein with its signal sequence N-terminal to the IL12p35 protein without its signal sequence (IL12p40LinkerIL12p35)
[0371] SEQ ID NO: 12 Human IL-12 p70 single chain protein with a (Gly₄Ser)₃ linker joining the IL12p35 protein with its signal sequence N-terminal to the IL12p40 protein without its signal sequence (IL12p35LinkerIL12p40)
[0372] SEQ ID NO: 13 Human Interferon alpha 2 protein sequence
[0373] SEQ ID NO: 14 Human Fms-related tyrosine kinase 3 ligand (Flt3L) soluble extracellular domain protein sequence
[0374] SEQ ID NO: 15 Human MIP1alpha LD78beta (MIP1a) protein sequence
[0375] SEQ ID NO: 16 Human CXCL9 protein sequence
[0376] SEQ ID NO: 17 Human CCL21 protein sequence
[0377] SEQ ID NO: 18 Human CCL5 protein sequence
[0378] SEQ ID NO: 19 Human CCL19 protein sequence
[0379] SEQ ID NO: 20 Human IL-18 long isoform
[0380] SEQ ID NO: 21 Human IL-15 protein with N-terminal human Ig leader sequence
[0381] SEQ ID NO: 22 Human Ig leader peptide sequence
[0382] SEQ ID NO: 23 Human IL-15 protein sequence without leader sequence
[0383] SEQ ID NO: 24 Human CCL21 C-terminally truncated protein sequence (CCL21t)
[0384] SEQ ID NO: 25 Human IL-15 receptor alpha Sushi domain protein sequence, with IL-15 receptor alpha leader sequence at N-terminus, with a C-terminal myc peptide linking it to a PDGF receptor transmembrane domain (IL15RsushimycTM)
[0385] SEQ ID NO: 26 Human IL-15 receptor alpha Sushi domain protein sequence with IL-15 receptor alpha leader sequence at N-terminus
[0386] SEQ ID NO: 27 Myc peptide sequence
[0387] SEQ ID NO: 28 PDGF receptor transmembrane domain protein sequence
[0388] SEQ ID NO: 29 Human IL-15 receptor alpha Sushi domain protein sequence, with IL-15 receptor alpha leader sequence at N-terminus, with a Gly₄Ser C-terminal peptide sequence linking it to a PDGF receptor transmembrane domain (IL15RsushiG4STM)
[0389] SEQ ID NO: 30 Gly₄Ser peptide linker sequence
[0390] SEQ ID NO: 31 (Gly₄Ser)₃ peptide linker sequence
[0391] SEQ ID NO: 32 Human CCL21 coding DNA sequence encoding SEQ ID NO: 17
[0392] SEQ ID NO: 33 Human CCL21 modified codon sequence (CCL21mod) encoding same protein sequence as encoded by SEQ ID NO: 32
[0393] SEQ ID NO: 34 Human CCL21 coding sequence truncated at the 3′ end to produce a C-terminally truncated protein sequence (SEQ ID NO: 24)
[0394] SEQ ID NO: 35 Human CCL21 modified coding sequence truncated at the 3′ end (CCL21tmod) to produce a C-terminally truncated protein sequence (SEQ ID NO: 24), the same protein sequence as encoded by SEQ ID NO: 34
[0395] SEQ ID NO: 36 Protein sequence encoded by NG-704 transgene cassette
[0396] SEQ ID NO: 37 Protein sequence encoded by NG-706 transgene cassette
[0397] SEQ ID NO: 38 Protein sequence encoded by NG-707 transgene cassette
[0398] SEQ ID NO: 39 Protein sequence encoded by NG-708 transgene cassette
[0399] SEQ ID NO: 40 Protein sequence encoded by NG-709 transgene cassette
[0400] SEQ ID NO: 41 Protein sequence encoded by NG-720 transgene cassette
[0401] SEQ ID NO: 42 Protein sequence encoded by NG-721 transgene cassette
[0402] SEQ ID NO: 43 Protein sequence encoded by NG-722 transgene cassette
[0403] SEQ ID NO: 44 Protein sequence encoded by NG-723 transgene cassette
[0404] SEQ ID NO: 45 Protein sequence encoded by NG-724 transgene cassette
[0405] SEQ ID NO: 46 Protein sequence encoded by NG-725 transgene cassette
[0406] SEQ ID NO: 47 Protein sequence encoded by NG-726 transgene cassette
[0407] SEQ ID NO: 48 Protein sequence encoded by NG-740 transgene cassette
[0408] SEQ ID NO: 49 Protein sequence encoded by NG-742 transgene cassette
[0409] SEQ ID NO: 50 Protein sequence encoded by NG-744 transgene cassette
[0410] SEQ ID NO: 51 Protein sequence encoded by NG-746 transgene cassette
[0411] SEQ ID NO: 52 Protein sequence encoded by NG-750 transgene cassette
[0412] SEQ ID NO: 53 Protein sequence encoded by NG-751 transgene cassette
[0413] SEQ ID NO: 54 Protein sequence encoded by NG-752 transgene cassette
[0414] SEQ ID NO: 55 Protein sequence encoded by NG-753 transgene cassette
[0415] SEQ ID NO: 56 Protein sequence encoded by NG-754 transgene cassette
[0416] SEQ ID NO: 57 Protein sequence encoded by NG-755 transgene cassette
[0417] SEQ ID NO: 58 Protein sequence encoded by NG-756 transgene cassette
[0418] SEQ ID NO: 59 Protein sequence encoded by NG-757 transgene cassette
[0419] SEQ ID NO: 60 Protein sequence encoded by NG-758 transgene cassette
[0420] SEQ ID NO: 61 Protein sequence encoded by NG-759 transgene cassette
[0421] SEQ ID NO: 62 Protein sequence encoded by NG-760 transgene cassette
[0422] SEQ ID NO: 63 Protein sequence encoded by NG-761 transgene cassette
[0423] SEQ ID NO: 64 Protein sequence encoded by NG-762 transgene cassette
[0424] SEQ ID NO: 65 Protein sequence encoded by NG-763 transgene cassette
[0425] SEQ ID NO: 66 Protein sequence encoded by NG-764 transgene cassette
[0426] SEQ ID NO: 67 Protein sequence encoded by NG-765 transgene cassette
[0427] SEQ ID NO: 68 Protein sequence encoded by NG-768 transgene cassette
[0428] SEQ ID NO: 69 Protein sequence encoded by NG-769 transgene cassette
[0429] SEQ ID NO: 70 Protein sequence encoded by NG-770 transgene cassette
[0430] SEQ ID NO: 71 Protein sequence encoded by NG-771 transgene cassette
[0431] SEQ ID NO: 72 Protein sequence encoded by NG-772 transgene cassette
[0432] SEQ ID NO: 73 Protein sequence encoded by NG-773 transgene cassette
[0433] SEQ ID NO: 74 Genome sequence of NG-701 virus
[0434] SEQ ID NO: 75 Genome sequence of NG-702 virus
[0435] SEQ ID NO: 76 Genome sequence of NG-703 virus
[0436] SEQ ID NO: 77 Genome sequence of NG-704 virus
[0437] SEQ ID NO: 78 Genome sequence of NG-706 virus
[0438] SEQ ID NO: 79 Genome sequence of NG-707 virus
[0439] SEQ ID NO: 80 Genome sequence of NG-708 virus
[0440] SEQ ID NO: 81 Genome sequence of NG-709 virus
[0441] SEQ ID NO: 82 Genome sequence of NG-720 virus
[0442] SEQ ID NO: 83 Genome sequence of NG-721 virus
[0443] SEQ ID NO: 84 Genome sequence of NG-722 virus
[0444] SEQ ID NO: 85 Genome sequence of NG-723 virus
[0445] SEQ ID NO: 86 Genome sequence of NG-724 virus
[0446] SEQ ID NO: 87 Genome sequence of NG-725 virus
[0447] SEQ ID NO: 88 Genome sequence of NG-726 virus
[0448] SEQ ID NO: 89 Genome sequence of NG-740 virus
[0449] SEQ ID NO: 90 Genome sequence of NG-742 virus
[0450] SEQ ID NO: 91 Genome sequence of NG-744 virus
[0451] SEQ ID NO: 92 Genome sequence of NG-746 virus
[0452] SEQ ID NO: 93 Genome sequence of NG-750 virus
[0453] SEQ ID NO: 94 Genome sequence of NG-751 virus
[0454] SEQ ID NO: 95 Genome sequence of NG-752 virus
[0455] SEQ ID NO: 96 Genome sequence of NG-753 virus
[0456] SEQ ID NO: 97 Genome sequence of NG-754 virus
[0457] SEQ ID NO: 98 Genome sequence of NG-755 virus
[0458] SEQ ID NO: 99 Genome sequence of NG-756 virus
[0459] SEQ ID NO: 100 Genome sequence of NG-757 virus
[0460] SEQ ID NO: 101 Genome sequence of NG-758 virus
[0461] SEQ ID NO: 102 Genome sequence of NG-759 virus
[0462] SEQ ID NO: 103 Genome sequence of NG-760 virus
[0463] SEQ ID NO: 104 Genome sequence of NG-761 virus
[0464] SEQ ID NO: 105 Genome sequence of NG-762 virus
[0465] SEQ ID NO: 106 Genome sequence of NG-763 virus
[0466] SEQ ID NO: 107 Genome sequence of NG-764 virus
[0467] SEQ ID NO: 108 Genome sequence of NG-765 virus
[0468] SEQ ID NO: 109 Genome sequence of NG-768 virus
[0469] SEQ ID NO: 110 Genome sequence of NG-769 virus
[0470] SEQ ID NO: 111 Genome sequence of NG-770 virus
[0471] SEQ ID NO: 112 Genome sequence of NG-771 virus
[0472] SEQ ID NO: 113 Genome sequence of NG-772 virus
[0473] SEQ ID NO: 114 Genome sequence of NG-773 virus
[0474] SEQ ID NO: 115 Mature human IL-12 p70 single chain protein with a (Gly₄Ser)₃ linker joining the IL12p40 protein without its signal sequence N-terminal to the IL12p35 protein without its signal sequence (mature IL12p40LinkerIL12p35)
[0475] SEQ ID NO: 116 DNA sequence for the protein coding sequence of the NG-701 transgene cassette, including the stop codon
[0476] SEQ ID NO: 117 DNA sequence for the protein coding sequence of the NG-702 transgene cassette, including the stop codon
[0477] SEQ ID NO: 118 DNA sequence for the protein coding sequence of the NG-703 transgene cassette, including the stop codon
[0478] SEQ ID NO: 119 DNA sequence for the protein coding sequence of the NG-704 transgene cassette, including the stop codon
[0479] SEQ ID NO: 120 DNA sequence for the protein coding sequence of the NG-706 transgene cassette, including the stop codon
[0480] SEQ ID NO: 121 DNA sequence for the protein coding sequence of the NG-707 transgene cassette, including the stop codon
[0481] SEQ ID NO: 122 DNA sequence for the protein coding sequence of the NG-708 transgene cassette, including the stop codon
[0482] SEQ ID NO: 123 DNA sequence for the protein coding sequence of the NG-709 transgene cassette, including the stop codon
[0483] SEQ ID NO: 124 DNA sequence for the protein coding sequence of the NG-720 transgene cassette, including the stop codon
[0484] SEQ ID NO: 125 DNA sequence for the protein coding sequence of the NG-721 transgene cassette, including the stop codon
[0485] SEQ ID NO: 126 DNA sequence for the protein coding sequence of the NG-722 transgene cassette, including the stop codon
[0486] SEQ ID NO: 127 DNA sequence for the protein coding sequence of the NG-723 transgene cassette, including the stop codon
[0487] SEQ ID NO: 128 DNA sequence for the protein coding sequence of the NG-724 transgene cassette, including the stop codon
[0488] SEQ ID NO: 129 DNA sequence for the protein coding sequence of the NG-725 transgene cassette, including the stop codon
[0489] SEQ ID NO: 130 DNA sequence for the protein coding sequence of the NG-726 transgene cassette, including the stop codon
[0490] SEQ ID NO: 131 DNA sequence for the protein coding sequence of the NG-740 transgene cassette, including the stop codon
[0491] SEQ ID NO: 132 DNA sequence for the protein coding sequence of the NG-742 transgene cassette, including the stop codon
[0492] SEQ ID NO: 133 DNA sequence for the protein coding sequence of the NG-744 transgene cassette, including the stop codon
[0493] SEQ ID NO: 134 DNA sequence for the protein coding sequence of the NG-746 transgene cassette, including the stop codon
[0494] SEQ ID NO: 135 DNA sequence for the protein coding sequence of the NG-750 transgene cassette, including the stop codon
[0495] SEQ ID NO: 136 DNA sequence for the protein coding sequence of the NG-751 transgene cassette, including the stop codon
[0496] SEQ ID NO: 137 DNA sequence for the protein coding sequence of the NG-752 transgene cassette, including the stop codon
[0497] SEQ ID NO: 138 DNA sequence for the protein coding sequence of the NG-753 transgene cassette, including the stop codon
[0498] SEQ ID NO: 139 DNA sequence for the protein coding sequence of the NG-754 transgene cassette, including the stop codon
[0499] SEQ ID NO: 140 DNA sequence for the protein coding sequence of the NG-755 transgene cassette, including the stop codon
[0500] SEQ ID NO: 141 DNA sequence for the protein coding sequence of the NG-756 transgene cassette, including the stop codon
[0501] SEQ ID NO: 142 DNA sequence for the protein coding sequence of the NG-757 transgene cassette, including the stop codon
[0502] SEQ ID NO: 143 DNA sequence for the protein coding sequence of the NG-758 transgene cassette, including the stop codon
[0503] SEQ ID NO: 144 DNA sequence for the protein coding sequence of the NG-759 transgene cassette, including the stop codon
[0504] SEQ ID NO: 145 DNA sequence for the protein coding sequence of the NG-760 transgene cassette, including the stop codon
[0505] SEQ ID NO: 146 DNA sequence for the protein coding sequence of the NG-761 transgene cassette, including the stop codon
[0506] SEQ ID NO: 147 DNA sequence for the protein coding sequence of the NG-762 transgene cassette, including the stop codon
[0507] SEQ ID NO: 148 DNA sequence for the protein coding sequence of the NG-763 transgene cassette, including the stop codon
[0508] SEQ ID NO: 149 DNA sequence for the protein coding sequence of the NG-764 transgene cassette, including the stop codon
[0509] SEQ ID NO: 150 DNA sequence for the protein coding sequence of the NG-765 transgene cassette, including the stop codon
[0510] SEQ ID NO: 151 DNA sequence for the protein coding sequence of the NG-768 transgene cassette, including the stop codon
[0511] SEQ ID NO: 152 DNA sequence for the protein coding sequence of the NG-769 transgene cassette, including the stop codon
[0512] SEQ ID NO: 153 DNA sequence for the protein coding sequence of the NG-770 transgene cassette, including the stop codon
[0513] SEQ ID NO: 154 DNA sequence for the protein coding sequence of the NG-771 transgene cassette, including the stop codon
[0514] SEQ ID NO: 155 DNA sequence for the protein coding sequence of the NG-772 transgene cassette, including the stop codon
[0515] SEQ ID NO: 156 DNA sequence for the protein coding sequence of the NG-773 transgene cassette, including the stop codon
[0516] SEQ ID NO: 157 PDGF receptor A transmembrane domain amino acid sequence
[0517] SEQ ID NO: 158 PDGF receptor B transmembrane domain amino acid sequence
[0518] SEQ ID NO: 159 Insulin-like growth factor 1 receptor transmembrane domain amino acid sequence
[0519] SEQ ID NO: 160 IL-6 receptor transmembrane domain amino acid sequence
[0520] SEQ ID NO: 161 CD28 transmembrane domain amino acid sequence
[0521] SEQ ID NO: 162 Sequence comprising a start codon—(gcc)gccRccAUGg
[0522] SEQ ID NO: 163 Human IL-15 protein with N-terminal human CD33 leader sequence
[0523] SEQ ID NO: 164 Human CD33 leader peptide sequence
[0524] SEQ ID NO: 165 Human IL-15 protein with N-terminal human IL-2 leader sequence
[0525] SEQ ID NO: 166 Human IL-2 leader peptide sequence
[0526] SEQ ID NO: 167 Protein sequence encoded by NG-748 transgene cassette
[0527] SEQ ID NO: 168 Protein sequence encoded by NG-774 transgene cassette
[0528] SEQ ID NO: 169 Protein sequence encoded by NG-775 transgene cassette
[0529] SEQ ID NO: 170 Protein sequence encoded by NG-776 transgene cassette
[0530] SEQ ID NO: 171 Protein sequence encoded by NG-777 transgene cassette
[0531] SEQ ID NO: 172 Protein sequence encoded by NG-781 transgene cassette
[0532] SEQ ID NO: 173 Protein sequence encoded by NG-782 transgene cassette
[0533] SEQ ID NO: 174 Protein sequence encoded by NG-784 transgene cassette
[0534] SEQ ID NO: 175 Protein sequence encoded by NG-785 transgene cassette
[0535] SEQ ID NO: 176 Protein sequence encoded by NG-785A transgene cassette
[0536] SEQ ID NO: 177 Protein sequence encoded by NG-786A transgene cassette
[0537] SEQ ID NO: 178 Protein sequence encoded by NG-787 transgene cassette
[0538] SEQ ID NO: 179 Protein sequence encoded by NG-787A transgene cassette
[0539] SEQ ID NO: 180 Protein sequence encoded by NG-788P transgene cassette
[0540] SEQ ID NO: 181 Protein sequence encoded by NG-789P transgene cassette
[0541] SEQ ID NO: 182 Protein sequence encoded by NG-790P transgene cassette
[0542] SEQ ID NO: 183 Protein sequence encoded by NG-791A transgene cassette
[0543] SEQ ID NO: 184 Protein sequence encoded by NG-792A transgene cassette
[0544] SEQ ID NO: 185 Protein sequence encoded by NG-794A transgene cassette
[0545] SEQ ID NO: 186 Protein sequence encoded by NG-795A transgene cassette
[0546] SEQ ID NO: 187 Protein sequence encoded by NG-796A transgene cassette
[0547] SEQ ID NO: 188 Protein sequence encoded by NG-799A transgene cassette
[0548] SEQ ID NO: 189 DNA sequence for the protein coding sequence of the NG-748 transgene cassette, including the stop codon
[0549] SEQ ID NO: 190 DNA sequence for the protein coding sequence of the NG-774 transgene cassette, including the stop codon
[0550] SEQ ID NO: 191 DNA sequence for the protein coding sequence of the NG-775 transgene cassette, including the stop codon
[0551] SEQ ID NO: 192 DNA sequence for the protein coding sequence of the NG-776 transgene cassette, including the stop codon
[0552] SEQ ID NO: 193 DNA sequence for the protein coding sequence of the NG-777 transgene cassette, including the stop codon
[0553] SEQ ID NO: 194 DNA sequence for the protein coding sequence of the NG-781 transgene cassette, including the stop codon
[0554] SEQ ID NO: 195 DNA sequence for the protein coding sequence of the NG-782 transgene cassette, including the stop codon
[0555] SEQ ID NO: 196 DNA sequence for the protein coding sequence of the NG-784 transgene cassette, including the stop codon
[0556] SEQ ID NO: 197 DNA sequence for the protein coding sequence of the NG-785 transgene cassette, including the stop codon
[0557] SEQ ID NO: 198 DNA sequence for the protein coding sequence of the NG-785A transgene cassette, including the stop codon
[0558] SEQ ID NO: 199 DNA sequence for the protein coding sequence of the NG-786A transgene cassette, including the stop codon
[0559] SEQ ID NO: 200 DNA sequence for the protein coding sequence of the NG-787 transgene cassette, including the stop codon
[0560] SEQ ID NO: 201 DNA sequence for the protein coding sequence of the NG-787A transgene cassette, including the stop codon
[0561] SEQ ID NO: 202 DNA sequence for the protein coding sequence of the NG-788P transgene cassette, including the stop codon
[0562] SEQ ID NO: 203 DNA sequence for the protein coding sequence of the NG-789P transgene cassette, including the stop codon
[0563] SEQ ID NO: 204 DNA sequence for the protein coding sequence of the NG-790P transgene cassette, including the stop codon
[0564] SEQ ID NO: 205 DNA sequence for the protein coding sequence of the NG-791A transgene cassette, including the stop codon
[0565] SEQ ID NO: 206 DNA sequence for the protein coding sequence of the NG-792A transgene cassette, including the stop codon
[0566] SEQ ID NO: 207 DNA sequence for the protein coding sequence of the NG-794A transgene cassette, including the stop codon
[0567] SEQ ID NO: 208 DNA sequence for the protein coding sequence of the NG-795A transgene cassette, including the stop codon
[0568] SEQ ID NO: 209 DNA sequence for the protein coding sequence of the NG-796A transgene cassette, including the stop codon
[0569] SEQ ID NO: 210 DNA sequence for the protein coding sequence of the NG-799A transgene cassette, including the stop codon
[0570] SEQ ID NO: 211 Genome sequence of NG-748 virus
[0571] SEQ ID NO: 212 Genome sequence of NG-774 virus
[0572] SEQ ID NO: 213 Genome sequence of NG-775 virus
[0573] SEQ ID NO: 214 Genome sequence of NG-776 virus
[0574] SEQ ID NO: 215 Genome sequence of NG-777 virus
[0575] SEQ ID NO: 216 Genome sequence of NG-781 virus
[0576] SEQ ID NO: 217 Genome sequence of NG-782 virus
[0577] SEQ ID NO: 218 Genome sequence of NG-784 virus
[0578] SEQ ID NO: 219 Genome sequence of NG-785 virus
[0579] SEQ ID NO: 220 Genome sequence of NG-785A virus
[0580] SEQ ID NO: 221 Genome sequence of NG-786A virus
[0581] SEQ ID NO: 222 Genome sequence of NG-787 virus
[0582] SEQ ID NO: 223 Genome sequence of NG-787A virus
[0583] SEQ ID NO: 224 Genome sequence of NG-788P virus
[0584] SEQ ID NO: 225 Genome sequence of NG-789P virus
[0585] SEQ ID NO: 226 Genome sequence of NG-790P virus
[0586] SEQ ID NO: 227 Genome sequence of NG-791A virus
[0587] SEQ ID NO: 228 Genome sequence of NG-792A virus
[0588] SEQ ID NO: 229 Genome sequence of NG-794A virus
[0589] SEQ ID NO: 230 Genome sequence of NG-795A virus
[0590] SEQ ID NO: 231 Genome sequence of NG-796A virus
[0591] SEQ ID NO: 232 Genome sequence of NG-799A virus
[0592] SEQ ID NO: 233 Protein sequence encoded by NG-701 transgene cassette
[0593] SEQ ID NO: 234 Protein sequence encoded by NG-702 transgene cassette
[0594] SEQ ID NO: 235 Protein sequence encoded by NG-703 transgene cassette
[0595] SEQ ID NO: 236 Human IL-15 protein with N-terminal human Ig leader sequence with a peptide linker joining it to the Human IL-15 receptor alpha Sushi domain without its' signal sequence
[0596] SEQ ID NO: 237 Linker peptide joining IL-15 to IL-15 receptor alpha sushi domain in NG-787 and NG-787A
[0597] SEQ ID NO: 238 Human PDGFR Receptor A transmembrane region peptide
[0598] SEQ ID NO: 239 Human PDGFR Receptor B transmembrane region peptide
[0599] SEQ ID NO: 240 Human Insulin-Like Growth Factor 1 transmembrane region peptide
[0600] SEQ ID NO: 241 Human IL6-R transmembrane region peptide
[0601] SEQ ID NO: 242 Human CD28 transmembrane region peptide
[0602] SEQ ID NO: 243 Human IL-15 receptor alpha Sushi domain protein sequence
[0603] SEQ ID NO: 244 Protein sequence of recombinant N-terminally His-tagged IL-15Ra sushi domain protein with C-terminal P2A peptide sequence
[0604] SEQ ID NO: 245 DNA sequence of CMV pUC vector pUC-796A
[0605] SEQ ID NO: 246 DNA sequence of CMV pUC vector pRES-128

### EXAMPLES

### EXAMPLE 1: Activity of Recombinant IL-15, IL-18 and IFNα Proteins in Primary Human Tumour Samples

[0606] To evaluate potential additive or synergistic activities of different combinations of cytokines and/or chemokines on primary tumour cell culture responses, recombinant proteins were used to model molecules encoded as transgenes in viruses. For effects on primary human tumour cells, surgically excised tumour samples were placed in Aqix organ transportation medium (supplemented with amphotericin B, penicillin, streptomycin, gentamycin and metronidazole) and shipped from the clinical site at 4° C. and obtained for processing in the laboratory within 24h. Samples were cut into small pieces using scalpels and then enzymatically dissociated using a tumour dissociation mix (Miltenyi Biotech) on a Gentle MACS tissue disruptor (Miltenyi Biotech). Single cell suspensions were obtained by filtering and plated into 96 well or 24 well plates, depending on the cell yield in either RPMI (Gibco) supplemented with foetal bovine serum, L-glutamine, sodium pyruvate and non-essential amino acids, or Cancer Cell Line Medium XF (PromoCell). Both media formulations were additionally supplemented with amphotericin B, penicillin and streptomycin. Cell types contained in these suspensions were routinely characterized by flow cytometry and shown to include tumour cells and different immune cell subsets, including T cells, B cells and NK cells.

[0607] Three primary tumour samples, tumour 63 (breast), tumour 64 (CRC) and tumour 65 (kidney) were received and processed as described above. Recombinant IL-12 p70 (15 ng/mL, R&D Systems), IL-18 (50 ng/mL, RnD Systems) and IL-15 (50 ng/mL, InvivoGen) were added either alone or in combination to the dissociated tumour cell cultures. Supernatant samples were harvested 72 hours after stimulation and were clarified as described previously. IFNγ protein was quantified by ELISA. Both IL-12 and IL-15 individually stimulated IFNγ production from tumour 64 and 65 cultures (but not 63), but the combination of IL-12+IL-15, or IL-12+IL-15+IL-18 stimulated the production of higher IFNγ levels than these stimuli alone, including from tumour 63 where no other combination produced detectable levels (FIG. 1A). In these tumour cell cultures, recombinant IL-18 did not stimulate IFNγ production and had little or no effect on the production of IFNγ triggered by IL-15 or the combination of IL-12 and IL-15.

[0608] In a second experiment, a breast tumour sample (tumour 60) was dissociated and cultured as described above with recombinant proteins. Live cells were harvested 72h post infection by scraping the monolayer and pipetting gently. Cells were pelleted by centrifugation at 300×g before adding 200 μL PBS containing 1 μL of Live-Dead Fixable Aqua (Life Technologies) and incubating on ice in the dark for 10 minutes. Samples were then pelleted by centrifugation before adding a cocktail of antibodies targeting several cell surface proteins (CD45, CD3, CD4, CD8, CD56, CD107a and CD25) in 50 μL cold PBS containing 2% FBS (flow buffer). Samples were incubated on ice in the dark for 20-30 minutes before being pelleted by centrifugation, washed twice in flow buffer and resuspended in flow buffer. Samples were then analysed by flow cytometry using an Attune NxT flow cytometer. Data showed that IL-15 alone, or in combination with IL-12 and IL-18, increased expression of the CD25 activation marker on CD4 and CD8 T cells, and NK cells (FIG. 1B). CD107a expression on NK cells was increased by the presence of IL-12, IL-15, IL-18 or combinations thereof. CD107a expression on CD4 and CD8 T cells was increased by the presence of IL-15, which was further enhanced by IL-12 or IL-12 plus IL-18. baseline (FIG. 1C).

[0609] In a third experiment, PBMCs from a healthy donor were cultured in RPMI (Gibco) supplemented with foetal bovine serum, L-glutamine, Na-Pyruvate and non-essential amino acids with the indicated recombinant proteins. Live cells were harvested 48 hours post stimulation and analysed by flow cytometry. However, in this case, 12 hours before harvesting, cells were treated with brefeldin A and an additional step of fixation/permeabilization was performed after the described above extracellular staining (using BD Cytofix/Cytoperm™ kit), after which cells were incubated with anti-IFNγ antibodies on ice in the dark for 30 minutes. Then cells were pelleted by centrifugation, washed twice in flow buffer and resuspended in flow buffer. Samples were analysed by flow cytometry using an Attune NxT flow cytometer. Data showed that IL-12 in combination with IL-15 increased the production of the IFNγ by CD4 and CD8 T cells and by NK cells, and this was further enhanced by the presence of IL-18 (FIG. 1D).

### EXAMPLE 2: Enhancement of T-Cell Mediated Killing of Target Cells by IL-12 with and without Other Recombinant Cytokines

[0610] To evaluate the potential for IL-12, IL-15, IL-18 and IFNα (alone or in combination) to enhance the T-cell mediated killing of target cell, we used a virus encoding a bispecific T cell activator (TAc), targeting both fibroblast activation protein (FAP) present on the surface of tumour-associated fibroblasts, and CD3 on T-cells (FAP-TAc) to drive T-cell mediated killing of FAP-expressing cells (Freedman et al, 2018 An Oncolytic Virus Expressing a T-cell Engager Simultaneously Targets Cancer and Immunosuppressive Stromal Cells. Cancer Res Nov 18:1-14; WO2018/041838 and WO2018/041827).

[0611] A549 cells were infected with 1ppc NG-617, which expresses the FAP-TAc (also described in the literature as a bispecific T-cell engager, BiTE). Supernatants were harvested 11 days post infection and clarified by centrifugation at 300×g for 5 minutes and then aliquoted and frozen at −80° C. The FAP expressing lung fibroblast cell line MRC-5 was seeded into 96 well plates at a density of 1×10⁴ cells per well which were incubated at 37° C., 5% CO₂ for 24 hours before staining with 5μM Caspase Green reagent (IncuCyte; Essen Bioscience). Media was removed and replaced with freshly thawed NG-617 treated cell supernatant containing FAP-TAc protein, along with T cells isolated from human PBMC donors at 6×10⁵ cells per well, and recombinant IL-12 p70 (15 ng/mL, R&D Systems) was added, either alone or in combination with IL-18 (50 ng/mL, R&D Systems), IL-15 (50 ng/mL, InvivoGen) and/or IFNα(1,500U/mL, InvivoGen). Plates were then incubated at 37° C., 5% CO₂ for 24 hours in an IncuCyte live cell imager taking 4 images per well every 30 minutes. Data showed that IL-12 alone did not enhance FAP-TAc mediated T cell killing of MRC5 cells above that stimulated by FAP-TAc alone (observed as an increase in caspase positive MRC5 cells), while IL-12 and IL-15 together with or without IL-18 providing enhancement of killing (FIG. 2A). In the same experiment, IFNα further enhanced T-cell mediated killing with or without added cytokines (FIG. 2B).

[0612] In a second experiment, CD45+tumour infiltrating leukocytes (TILs) were isolated from tumour 70 using a TIL isolation kit (Miltenyi) on an AutoMACS cell isolator (Miltenyi). A T-cell mediated killing assay was then carried out as described above, using TILs in place of PBMC-derived T cells. Data showed that IL-12 alone did not enhance T cell killing of MRC5 cells above the FAP-TAc alone while IL-12+IL-15 and IL-12+IL-15+IL-18 did enhance killing, with IL-12+IL-15 providing the greatest enhancement (FIG. 2C). In the same experiment, IFNα enhanced killing when added to any of the combinations except IL-12 alone (FIG. 2D).

[0613] In another experiment, NK cells were isolated from PBMCs and pre-stimulated with IL-12 and/or IL-15 for 24 hours and then rested for 12 hours before incubating them with the low MHC class I expressing K562 cell line. K562 cells (target cells) were pre-labelled with Violet Cell tracker (ThermoFisher) according to the manufacturers protocol and then incubated at 37° C., 5% CO₂ with NK cells at a 1:1 ratio (5×10⁴ cells per well in a 96-well plate) in the presence of 5μM Caspase Green reagent for 3 hours. Cells were then spun at 300×g for 5 minutes and washed twice with PBS and resuspended in flow buffer. Samples were analysed by flow cytometry using an Attune NxT flow cytometer and percentage of caspase-positive K562 cells were plotted (FIG. 2E). Data showed that both IL-12 and IL_15 can individually enhance NK-mediated killing, which is further increased by combining these two cytokines.

[0614] In a similar experiment, K562 cells were incubated as described above with TILs derived from a primary kidney tumour. Dissociated tumour cells containing ˜16% NK as a proportion of total live cells were seeded in a collagen-coated 24-well plate and after 4 hours non-adherent cells (TIL-enriched cells) was transferred to another collagen-coated plate and stimulated or not with the indicated cytokines for 18 hours. Cells were then counted and incubated with labelled K562 target cells for 4 hours (ratio effectors:target cells 2:1 based on NK numbers at day 0). Primary tumour-infiltrating NK cells stimulated with IL-12 or IL-15 alone showed enhanced killing of K562 target cells, with a combination of the two cytokines giving a greater enhancement of killing (FIG. 2F).

### EXAMPLE 3: Migration of Immune Cells in Response to Recombinant Chemokines

[0615] Several experiments were carried out to evaluate chemokine effects on the migration of the immune cell subsets in PBMC preparations as well as TILs isolated from primary tumour samples. Migration assays were carried out using the Transwell assay system (Corning), whereby chemokines were added to media in a 96 or 24 well plate, before adding a plate insert on top with a permeable membrane containing holes of 3 μm in diameter, into which the cells were added. T cells and their subsets were magnetically isolated from PBMCs using MACS beads (Miltenyi), and TILs were isolated from tumour samples dissociated as described in Example 1. Media either alone, or containing CXCL9, CXCL10, CCL19 or CCL21 at 50 nM, was added into the bottom of Transwell plates, before adding naïve T cells (100,000 cells per well) or effector CD8+ T cells (80,000 cells per well) into the upper compartment Plates were incubated at 37° C., 5% CO2 for 3 hours and 30 minutes before counting the cells in the lower compartment by flow cytometry using an Attune NxT (Thermofisher). All chemokines stimulated migration of both naïve and effector T-cells above the medium only control, but more naïve T cells were stimulated to migrate by CCL19 and CCL21 than by CXCL9 or CXCL10 (FIG. 3A), and the inverse was true for effector T cells, with CXCL9 and CXCL10 stimulated cells migrating in larger numbers (FIG. 3B).

[0616] In a second experiment, TILs isolated from a breast tumour (tumour 53) were rested for approximately 24h and then added to Transwell plates as described previously. All four chemokines stimulated migration above background (media only control), with CCL19 and CCL21 stimulating the migration of the largest number of TILs (FIG. 3C).

[0617] In a third experiment, leukocytes from dissociated primary lymph nodes removed as part of breast cancer surgery (same procedure used for primary tumours and described above in Example 1) were left to adhere on plastic in a flask (at 37° C., 5% C02) for 3 hours before removing non-adherent cells for the migration assay. A transwell migration assay was performed as described above in a 24-well plate, where 1.2×10⁵ cells were added to the upper compartment. Each condition was run in duplicate and cells in the bottom compartment after migration were counted and stained/analysed by flow cytometry using an Attune NxT (Thermofisher)(FIG. 3D). Data showed that both CXCL9 and CCL21 induced migration of lymph node-derived T cells (CD3+) and non-T cells (CD3-lymphocytes).

[0618] In another experiment, monocyte-derived dendritic cells from a healthy donor were prepared by culturing them with 50 ng/mL of recombinant GM-CSF plus IL-4 for 7 days and then matured with LPS for 24h before testing them in migration assays. Transwell assay was performed using 24-well plates, with inserts whose permeable membrane contains holes of 8μm in diameter, which were previously coated with 100 μg/mL of Matrigel. Migration assay were then run for 6 hours at 37° C., 5% CO2 and analysed as described above. As shown in FIG. 3E, monocyte-derived dendritic cells strongly respond to both CCL19 and CCL21. An Incucyte chemotaxis assay was also performed following the manufacture's protocol using 96-well plates (Essen Bioscience) with 8μm-pore membrane coated with Matrigel (FIG. 3F). Cells on top of the membrane were scanned and quantified over time using the Chemotaxis analysis software. As shown in FIG. 3F, dendritic cell numbers in the top compartment decreased over time in response to recombinant CCL19 or CCL21 compared to media control, demonstrating their chemotactic response to these chemokines.

### EXAMPLE 4: Cytokine-Mediated Enhancement of Tumour Ag-Specific Responses by Lymph Node Derived T-Cells from Breast Cancer Surgery

[0619] To assess if IL-12 and IL-15 cytokines can enhance an antigen-specific anti-tumour T cell response, an IFNγ ELISpot assay with primary lymph nodes derived cells from breast cancer surgery was performed. After dissociation (as described above in Example 3), lymph node cells were seeded in a U-bottom 96-well plate and treated with either breast cancer-associated peptide pools, or CEFT (Clostridium tetani, Epstein-Barr virus (HHV-4), Human cytomegalovirus (HHV-5), Influenza A) peptide pool or just DMSO-containing media as controls. The following breast cancer-associated peptide pools (purchased from JPT) were used in this assay: MUC-1 (mucin-1), HER2-ECD (receptor tyrosine-protein kinase erbB-2-extracellular domain) and HER2-ICD (receptor tyrosine-protein kinase erbB-2-intracellular domain). After 1 hour, recombinant IL-12 or IL-15, or combination of those cytokines, was added to the cultures at the indicated concentrations and cells were left for 6 days at 37° C., 5% CO2. The day before the IFNγ ELISpot assay, cells were rested (by removing cell culture media and replacing it just with complete media). On the day of ELISpot, cells were counted and plated (2.5×10⁴ per well) and boosted with the same peptides they were stimulated with. Also, at the same time, previously frozen cells (on the day of lymph node dissociation) from the same sample were thawed and added (1.85×10⁵ per well) as antigen presenting cells. IFNγ ELISpot plates were developed according to the manufacture's protocol (Mabtech) and then spot numbers read using an ELISpot plate reader (CTL Europe GmbH). As shown in FIG. 4, IL-15 significantly increased T-cell responses to MUC-1 (FIG. 4A) and HER2 (FIG. 4B).

### EXAMPLE 5: Production of Viruses Encoding Human IL-12 p35 and IL-12 p40 Either as Separate Proteins or Joined by a Flexible Linker

[0620] Three viruses (NG-701, NG-702, NG-703) were generated that differently encode human IL-12 transgenes (Table 1, FIG. 5A).

Table 1

| Virus ID | Transgene Cassette |
|---|---|
| NG-701 | SSA¹-IL12p35²-P2A³-IL12p40⁴-PA⁵ |
| (SEQ ID NO: 74) | (SEQ ID NO: 233) |
| NG-702 | SSA¹-IL12p40LinkerIL12p35⁶-PA⁵ |
| (SEQ ID NO: 75) | (SEQ ID NO: 234) |
| NG-703 | SSA¹-IL12p35LinkerIL12p40⁷-PA⁵ |
| (SEQ ID NO: 76) | (SEQ ID NO: 235) |

¹SEQ ID NO. 1; ²SEQ ID NO. 9; ³SEQ ID NO. 4; ⁴SEQ ID NO. 10; ⁵SEQ ID NO. 8; ⁶SEQ ID NO. 11; ⁷SEQ ID NO. 12;

[0621] In each transgene cassette, the cDNA encoding the IL-12 sequences was flanked at the 5′ end with a short splice acceptor sequence (SSA, SEQ ID NO: 1-CAGG). At the 3′ end of the IL-12 sequences, a SV40 late poly(A) sequence (PA, SEQ ID NO: 8) was encoded. In virus NG-701 the individual IL-12 p35 and IL-12 p40 sequences were linked with a P2A ribosome skipping sequence (SEQ ID NO: 4) to enable both IL-12 chains to be translated and produced as separate chains. In viruses NG-702 and NG-703 the IL-12 transgene encoded a single chain variant created by linking the sequences for the two individual p35 and p40 IL-12 chains with a sequence encoding a flexible linker (Gly₄Ser).

### Virus Production

[0622] The plasmid pColoAd2.4 (WO2015/097220) was used to generate the plasmids pNG-701, pNG-702 and pNG-703 by direct insertion of synthesised transgene cassettes encoding the transgene proteins. The pColoAd2.4 plasmid and transgene cassette were digested using AsiSI and SbfI restriction enzymes. Each digested transgene cassette was directly ligated into the digested pColoAd2.4 plasmid. The pNG-701 transgene cassette encodes for IL-12 p35 and IL-12 p40 as two separate transgene proteins (SEQ IDs NOs: 9 and 10), the pNG-702 transgene cassette encodes a single chain IL-12 molecule (SEQ ID NO. 11) comprising the IL-12 p40 protein covalently linked to the N-terminus of the IL-12 p35 protein with a (Gly₄Ser)₃ linker (SEQ ID NO: 31) and the pNG-703 transgene cassette encodes a single chain IL-12 molecule (SEQ ID NO: 12) comprising the IL-12 p35 protein covalently linked to the N-terminus of the IL-12 p40 protein with a (Gly₄Ser)₃ linker. Schematics of the transgene cassettes are shown in FIG. 5A. Construction of plasmid DNA was confirmed by restriction analysis and Sanger sequencing.

[0623] The plasmids, pNG-701, pNG-702 and pNG-703 were linearised by restriction digest with the enzyme AscI to produce the virus genomes. The viruses were amplified and purified according to methods given below.

[0624] Digested DNA was purified by phenol/chloroform extraction and precipitated for 16±2 hrs, −20° C. in 600 μl >95% molecular biology grade ethanol and 15 μl 3M Sodium Acetate. The precipitated DNA was pelleted by centrifuging at 13000 rpm, 5 mins and was washed twice in 500 μl 70% ethanol. The clean DNA pellet was air dried, resuspended in 500 μl OptiMEM containing 15 μl lipofectamine transfection reagent and incubated for 30 mins, RT. The transfection mixture was then added drop wise to a T-25 flask containing 293 cells grown to 70% confluency. After incubation of the cells with the transfection mix for approximately 2 hrs at 37° C., 5% CO₂ 4mls of cell media (DMEM high glucose with glutamine supplemented with 2% FBS) was added to the cells and the flasks was incubated 37° C., 5% CO₂.

[0625] The transfected 293 cells were monitored every 24 hrs and were supplemented with additional media as required. The production of virus was monitored by observation of a significant cytopathic effect (CPE) in the cell monolayer. Once extensive CPE was observed the virus was harvested from 293 cells by three freeze-thaw cycles. The harvested viruses were used to re-infect 293 cells in order to amplify the virus stocks. Viable virus production during amplification was confirmed by observation of significant CPE in the cell monolayer. Once CPE was observed the virus was harvested from 293 cells by three freeze-thaw cycles. The amplified stocks of viruses were used for further amplification before the viruses were purified by double caesium chloride banding to produce purified virus stocks.

[0626] Viral Particle Infectivity & IL-12 p70 Quantification

[0627] A549 human lung adenocarcinoma cells were seeded in 12 well plates at a cell density of 7.5×10⁵ cells/well and infected with either EnAd, NG-701, NG-702 or NG-703 at 0.01 particles per cell (ppc). Plates were incubated at 37° C., 5% CO₂ before harvesting cells and supernatants 3,4 or 7 days later. Supernatant samples were clarified by centrifugation at 300×g for 5 minutes. The cell fraction was obtained by adding RLT lysis buffer (Qiagen)+beta-mercaptoethanol (Sigma) to each well and pipetting to ensure maximal recovery. The cell fraction was then pooled with the pellet obtained during supernatant clarification and viral genomes were quantified for each time point by qPCR. Data demonstrated that each of the tested viruses produced similar quantities of viral genomes with similar kinetics (FIG. 5B). IL-12 p70 protein was quantified by ELISA from supernatant samples from the same experiment. ELISA data showed that all three viruses encoding IL-12 produced IL-12 p70 protein, with NG-701 and NG-702 producing more than NG-703 (FIG. 5C). A similar second study, using different ppc levels, RT-qPCR analysis demonstrated similar transgene mRNA expression by NG-701, NG-702 and NG-703 (FIG. 5D).

[0628] In a third experiment, A549 human lung adenocarcinoma cells were seeded in T175 flasks and infected with 10ppc of NG-701 or NG-702 at a cell density of 1.45×10⁷ cells/flask. Flasks were incubated at 37° C., 5% CO₂ before harvesting cells and supernatant 72 hours later. Cells and supernatant were separated by centrifugation at 300×g, as described above. IL-12 p40 and IL-12 p70 proteins were quantified in supernatant samples by ELISA. Data showed that NG-701, encoding IL-12 p40 and IL-12 p35 as separate proteins, predominantly produced the IL-12 p40 protein with little IL-12 p70, while NG-702, encoding the two IL-12 subunits joined by a flexible linker, produced primarily the IL-12 p70 protein (FIG. 5E).

[0629] In another experiment, A549 human lung adenocarcinoma cells were seeded in T175 flasks and infected with 10ppc of NG-702 or NG-703 at a cell density of 2.6×10⁷ cells/flask. Flasks were incubated at 37° C., 5% CO₂ before harvesting supernatant 72 hours later. Cells and supernatant were separated by centrifugation at 300×g, as described above. The functional activity of the produced IL-12 p70 protein was assessed using a HEK-Blue reporter cell line. HEK-Blue™ IL-12 (InvivoGen) cells stably express the human IL-12 receptor and genes of the IL-12 signalling pathway along with a STAT4-inducible secreted alkaline phosphatase (SEAP) reporter gene. HEK-Blue IL-12 cells were seeded at 5×10⁴ cells per well in 96 well plates before being stimulated with supernatants or recombinant IL-12 (InvivoGen) at 100 ng/mL, followed by incubation at 37° C., 5% CO2 for 18-24 hours. Assay plates were centrifuged at 300×g for 5 minutes before removing clarified supernatant and transferring 20 μL into a separate 96 well plate along with 180 μL of Quanti-Blue reagent. The plate was incubated for 1 hour at 37° C. before analysing the plate on SpectraMax i3x plate reader with absorbance set to 620 nm. Data showed that supernatant from NG-702 infected cells led to the secretion of more SEAP from the reporter cells than supernatants from NG-703 infected cells (FIG. 5F).

[0630] In a further study, purified human CD4+ or CD8+ T-cells were activated with anti-CD3, anti-CD28 or both anti-CD3 and anti-CD28, or left unactivated, and cultured in the presence of recombinant human IL-12 (rhIL-12) or supernatants (SN) from NG-702 infected A549 cells for 6 days. Cells were then harvested and analysed by flow cytometry for the expression of NG-107a as a measure activation of cytotoxic T-cell effector function. NG-702 supernatants enhanced the expression of CD107a to a similar degree to that seen with rhIL-12 (FIGS. 5G&H).

### EXAMPLE 6: Production of Viruses Encoding a Single Chain IL-12 Together with Other Transgenes

[0631] A set of viruses with transgene cassettes comprising a single chain IL-12 transgene as well as one or more additional transgenes were designed, produced and purified. Viruses NG-704, NG-706, NG-707, NG-708 and NG-709 were generated according to the methods of Example 5. For the remaining viruses (NG-720 and higher numbers), the pColoAd2.4 plasmid was digested using AsiSI and SbfI restriction enzymes and each synthesised transgene cassette was amplified by PCR using primers to add a 20 bp sequence to the 5′ and the 3′ ends of the amplified PCR product. The added sequences were complementary to sequences flanking the transgene cassette insertion site of the pColoAd2.4 plasmid and enabled direct assembly of the PCR amplified transgene cassette into the digested pColoAd2.4 plasmid. Subsequent steps were the same as described in Example 5. The viruses encoding a single chain IL-12 plus at least one other transgene are listed in Table 2 and illustrated in FIG. 6. For some virus preparations, smaller scale purifications were run using Optiprep (Iodixanol) density gradients, centrifuging at 155,000 g for 1 hour at 10° C., instead of using caesium chloride.

TABLE 2
Viruses with transgene cassettes having a single chain IL-12
(IL12p40LinkerIL12p35) plus one or more other transgenes

| Virus ID | Transgene Cassette |
|---|---|
| NG-704 (SEQ ID NO. 77) | SSA¹-IL12p40LinkerIL12p35⁶-P2A³-IFNa⁸-PA⁵ (SEQ ID NO. 36) |
| NG-706 (SEQ ID NO. 78) | SSA¹-IFNa⁸-P2A³-IL12p40LinkerIL12p35⁶-PA⁵ (SEQ ID NO. 37) |
| NG-707 (SEQ ID NO. 79) | SSA¹-Flt3L⁹-P2A³-MIP1a¹⁰-T2A¹¹-IFNa⁸-E2A¹²-CXCL9¹³-F2A¹⁴- |
| | IL12p40Linkerp35⁶-PA⁵ (SEQ ID NO. 38) |
| NG-708 (SEQ ID NO. 80) | SSA¹-IL12p40Linkerp35⁶-P2A³-CCL21¹⁵-T2A¹¹-CCL5¹⁶-E2A¹²- |
| | Flt3L⁹-PA⁵ (SEQ ID NO. 39) |
| NG-709 (SEQ ID NO. 81) | SSA¹-IFNa⁸-P2A³-CCL19¹⁷-T2A¹¹-IL18¹⁸-E2A¹²- |
| | IL12p40LinkerIL12p35⁶-PA⁵ (SEQ ID NO. 40) |
| NG-720 (SEQ ID NO. 82) | SSA¹-IL12p40LinkerIL12p35⁶-P2A³-IL15¹⁹-T2A¹¹- CXCL9¹³-E2A¹²- |
| | CCL21¹⁵-F2A¹⁴-IFNa⁸-PA⁵ (SEQ ID NO. 41) |
| NG-721 (SEQ ID NO. 83) | SSA¹-IL12p40LinkerIL12p35⁶-P2A³-IL15¹⁹-T2A¹¹- CXCL9¹³-E2A¹²- |
| | CCL21trunc²⁰-F2A¹⁴-IFNa⁸-PA⁵ (SEQ ID NO. 42) |
| NG-722 (SEQ ID NO. 84) | SSA¹-IL12p40LinkerIL12p35⁶-P2A³-CXCL9¹³-E2A¹²-IL15¹⁹-T2A¹¹- |
| | CCL21¹⁵-F2A¹⁴-IFNa⁸-PA⁵ (SEQ ID NO. 43) |
| NG-723 (SEQ ID NO. 85) | SSA¹-IL12p40LinkerIL12p35⁶-P2A³-CXCL9¹³-E2A¹²-IL15¹⁹-T2A¹¹- |
| | IFNa⁸-F2A¹⁴-CCL21¹⁵-PA⁵ (SEQ ID NO. 44) |
| NG-724 (SEQ ID NO. 86) | SSA¹-IL12p40LinkerIL12p35⁶-P2A³-CXCL9¹³-E2A¹²-IL15¹⁹-T2A¹¹- |
| | IFNa⁸-F2A¹⁴-CCL21trunc²⁰-PA⁵ (SEQ ID NO. 45) |
| NG-725 (SEQ ID NO. 87) | SSA¹-IL12p40LinkerIL12p35⁶-P2A³-IL15¹⁹-E2A¹²-CCL21¹⁵-F2A¹⁴- |
| | CXCL9¹³-T2A¹¹-IFNa⁸-PA⁵ (SEQ ID NO. 46) |
| NG-726 (SEQ ID NO. 88) | SSA¹-CCL21¹⁵-E2A¹²-IL15¹⁹-F2A¹⁴-IL12p40LinkerIL12p35⁶-T2A¹¹- |
| | CXCL9¹³-P2A³-IFNa⁸-PA⁵ (SEQ ID NO. 47) |
| NG-750 (SEQ ID NO. 93) | SSA¹-CCL21¹⁵-P2A³-IL15¹⁹-T2A¹¹-IFNa⁸-E2A¹²-CXCL9¹³-F2A¹⁴- |
| | IL12p40LinkerIL12p35⁶-PA⁵ (SEQ ID NO. 52) |
| NG-751 (SEQ ID NO. 94) | SSA¹-IL15¹⁹-P2A³-CCL21¹⁵-T2A¹¹-IFNa⁸-E2A¹²-CXCL9¹³-F2A¹⁴- |
| | IL12p40LinkerIL12p35⁶-PA⁵ (SEQ ID NO. 53) |
| NG-752 (SEQ ID NO. 95) | SSA¹-CCL21¹⁵-T2A¹¹-IL15¹⁹-P2A³-IFNa⁸-E2A¹²-CXCL9¹³-F2A¹⁴- |
| | IL12p40LinkerIL12p35⁶-PA⁵ (SEQ ID NO. 54) |
| NG-753 (SEQ ID NO. 96) | SSA¹-IL15¹⁹-T2A¹¹-CCL21¹⁵-P2A³-IFNa⁸-E2A¹²-CXCL9¹³-F2A¹⁴- |
| | IL12p40LinkerIL12p35⁶-PA⁵ (SEQ ID NO. 55) |
| NG-754 (SEQ ID NO. 97) | SSA¹-CXCL9¹³-T2A¹¹-CCL21¹⁵-P2A³-IFNa⁸-E2A¹²-IL15¹⁹-F2A¹⁴- |
| | IL12p40LinkerIL12p35⁶-PA⁵ (SEQ ID NO. 56) |
| NG-755 (SEQ ID NO. 98) | SSA¹-IL15¹⁹-P2A³-IFNa⁸-E2A¹²-CXCL9¹³-F2A¹⁴- |
| | IL12p40LinkerIL12p35⁶-PA⁵ (SEQ ID NO. 57) |
| NG-756 (SEQ ID NO. 99) | SSA¹-IL15¹⁹-T2A¹¹-IFNa⁸-E2A¹²-CXCL9¹³-F2A¹⁴- |
| | IL12p40LinkerIL12p35⁶-PA⁵ (SEQ ID NO. 58) |
| NG-757 (SEQ ID NO. 100) | SSA¹-CXCL9¹³-F2A¹⁴-IFNa⁸-E2A¹²-IL15¹⁹-T2A¹¹- |
| | IL12p40LinkerIL12p35⁶-PA⁵ (SEQ ID NO. 59) |
| NG-758 (SEQ ID NO. 101) | SSA¹-CXCL9¹³-F2A¹⁴-IFNa⁸-E2A¹²-IL15¹⁹-P2A³- |
| | IL12p40LinkerIL12p35⁶-PA⁵ (SEQ ID NO. 60) |
| NG-759 (SEQ ID NO. 102) | SSA¹-IL12p40LinkerIL12p35⁶-T2A¹¹-CXCL9¹³-F2A¹⁴-IFNa⁸-E2A¹²- |
| | IL15¹⁹-PA⁵ (SEQ ID NO. 61) |
| NG-760 (SEQ ID NO. 103) | SSA¹-IFNa⁸-E2A¹²-CCL21¹⁵-T2A¹¹-IL15¹⁹-P2A³-CXCL9¹³-F2A¹⁴- |
| | IL12p40LinkerIL12p35⁶-PA⁵ (SEQ ID NO. 62) |
| NG-761 (SEQ ID NO. 104) | SSA¹-IL15¹⁹-E2A¹²-CCL21¹⁵-T2A¹¹-IFNa⁸-P2A³-CXCL9¹³-F2A¹⁴- |
| | IL12p40LinkerIL12p35⁶-PA⁵ (SEQ ID NO. 63) |
| NG-762 (SEQ ID NO. 105) | SSA¹-IL15¹⁹-P2A³-IFNa⁸-E2A¹²-IL12p40LinkerIL12p35⁶-PA⁵ |
| | (SEQ ID NO. 64) |
| NG-763 (SEQ ID NO. 106) | SSA¹-IL15¹⁹-T2A¹¹-IFNa⁸-E2A¹²-IL12p40LinkerIL12p35⁶-PA⁵ |
| | (SEQ ID NO. 65) |
| NG-764 (SEQ ID NO. 107) | SSA¹-IL15¹⁹-F2A¹⁴-IFNa⁸-E2A¹²-IL12p40LinkerIL12p35⁶-PA⁵ |
| | (SEQ ID NO. 66) |
| NG-765 (SEQ ID NO. 108) | SSA¹-IL15¹⁹-P2A³-CXCL9¹³-F2A¹⁴-IL12p40LinkerIL12p35⁶-PA⁵ |
| | (SEQ ID NO. 67) |
| NG-768 (SEQ ID NO. 109) | SSA¹-CXCL9¹³-T2A¹¹-CCL21mod²³-P2A³-IFNa⁸-E2A¹²-IL15¹⁹-F2A¹⁴- |
| | IL12p40LinkerIL12p35⁶-PA⁵ (SEQ ID NO. 68) |
| NG-769 (SEQ ID NO. 110) | SSA¹-CCL21tmod²⁴-P2A³-IL15¹⁹-T2A¹¹-IFNa⁸-E2A¹²-CXCL9¹³- |
| | F2A¹⁴-IL12p40LinkerIL12p35⁶-PA⁵ (SEQ ID NO. 69) |
| NG-770 (SEQ ID NO. 111) | SSA¹-IL15¹⁹-P2A³-CCL21tmod²⁴-T2A¹¹-IFNa⁸-E2A¹²-CXCL9¹³- |
| | F2A¹⁴-IL12p40LinkerIL12p35⁶-PA⁵ (SEQ ID NO. 70) |
| NG-771 (SEQ ID NO. 112) | SSA¹-CCL21tmod²⁴-T2A¹¹-IL15¹⁹-P2A³-IFNa⁸-E2A¹²-CXCL9¹³- |
| | F2A¹⁴-IL12p40LinkerIL12p35⁶-PA⁵ (SEQ ID NO. 71) |
| NG-772 (SEQ ID NO. 113) | SSA¹-IL15¹⁹-T2A¹¹-CCL21tmod²⁴-P2A³-IFNa⁸-E2A¹²-CXCL9¹³-F2A⁹- |
| | IL12p40LinkerIL12p35⁶-PA⁵ (SEQ ID NO. 72) |
| NG-773 (SEQ ID NO. 114) | SSA¹-CXCL9¹³-T2A¹¹-CCL21tmod²⁴-P2A³-IFNa⁸-E2A¹²-IL15¹⁹- |
| | F2A¹⁴-IL12p40LinkerIL12p35⁶-PA⁵ (SEQ ID NO. 73) |
| NG-774 (SEQ ID No. 212) | SSA¹-IL15²⁵-T2A¹¹-IFNa⁸-E2A¹²-IL12p40LinkerIL12p35⁶-PA⁵ |
| | (SEQ ID NO. 168) |
| NG-775 (SEQ ID NO. 213) | SSA¹-IL15²⁵-P2A³-IFNa⁸-E2A¹²-IL12p40LinkerIL12p35⁶-PA⁵ |
| | (SEQ ID NO. 169) |
| NG-776 (SEQ ID NO. 214) | SSA¹-IL15²⁶-T2A¹¹-IFNa⁸-E2A¹²-IL12p40LinkerIL12p35⁶-PA⁵ |
| | (SEQ ID NO. 170) |
| NG-777 (SEQ ID NO. 215) | SSA¹-IL15²⁶-P2A³-IFNa⁸-E2A¹²-IL12p40LinkerIL12p35⁶-PA⁵ |
| | (SEQ ID NO. 171) |
| NG-781 (SEQ ID NO. 216) | SSA¹-IL15²⁵-T2A¹¹-IFNa⁸-E2A¹²-CCL21²⁸-F2A⁹- |
| | IL12p40LinkerIL12p35⁶-PA⁵ (SEQ ID NO. 172) |
| NG-782 (SEQ ID NO. 217) | SSA¹-IL15²⁵-T2A¹¹-IFNa⁸-E2A¹²-CXCL9¹³-F2A⁹- |
| | IL12p40LinkerIL12p35⁶-PA⁵ (SEQ ID NO. 173) |
| NG-784 (SEQ ID NO. 218) | SSA¹-CXCL9¹³-F2A⁹-IFNa⁸-E2A¹²-IL15²⁵-T2A¹¹- |
| | IL12p40LinkerIL12p35⁶-PA⁵ (SEQ ID NO. 174) |

¹SEQ ID NO. 1; ³SEQ ID NO. 4; ⁵SEQ ID NO. 8; ⁶SEQ ID NO. 11; ⁸SEQ ID NO. 13; ⁹SEQ ID NO. 14; ¹⁰SEQ ID NO. 15; ¹¹SEQ ID NO. 5; ¹²SEQ ID NO. 6; ¹³SEQ ID NO. 16; ¹⁴SEQ ID NO. 7; ¹⁵SEQ ID NO. 17; ¹⁶SEQ ID NO. 18; ¹⁷SEQ ID NO. 19; ¹⁸SEQ ID NO. 20; ¹⁹SEQ ID NO. 21; ²⁰SEQ ID NO. 24; ²³SEQ ID NO. 33; ²⁴SEQ ID NO. 35; ²⁵SEQ ID NO. 163; ²⁶SEQ ID NO. 165;

### EXAMPLE 7: Production and Activity of Viruses Encoding Human IL-12 and Other Transgenes

### Viral Particle Infectivity & Quantification of Transgene Protein Production

[0632] A549 cells were infected as described in Example 5, with either EnAd, NG-702, NG-704 or NG-706 at 100ppc. Supernatants and cells were harvested and clarified 24 or 48 hours later. Viral genomes were quantified for each time point by qPCR. Data demonstrated that each of the tested viruses produced similar quantities of viral genomes with similar kinetics (FIG. 7A). IL-12 p70 protein was quantified by ELISA from supernatant samples from the same experiment. ELISA data showed that all three viruses encoding single chain IL-12 produced IL-12 p70 protein, with NG-706 producing the most, and NG-704 the least (FIG. 7B). Quantification of IFNα˜ levels in the same supernatants by ELISA showed that NG-706 infected tumour cells produced less IFNα transgene protein than NG-704 infected cells (FIG. 7C).

[0633] In a second experiment, A549 human lung adenocarcinoma cells were seeded in 96 well plates at a cell density of 5×10⁴ cells/well and infected with either EnAd or NG-707 at 1ppc. Plates were incubated at 37° C., 5% CO2 before harvesting cells and supernatants 4 days later. Cells and supernatant samples were clarified and lysed as described previously. The cell fraction was analysed by RT-qPCR using primers targeting each of the encoded transgenes and data demonstrated that NG-707, but not EnAd, produced similar quantities of mRNA encoding each of the 5 encoded genes (FIG. 7D). IL-12 p70, Flt3 ligand (Flt3L), MIP1a, IFNα and CXCL9 transgene protein production was quantified by ELISA using supernatant samples from the same experiment ELISA data showed that NG-707 produced each of the 5 encoded proteins (FIG. 7E).

[0634] In a third experiment, A549 lung carcinoma cells were seeded and infected with NG-709, and supernatants harvested as described above. IL-12 p70, IFNα, MIP1a, CCL19 and IL-18 transgene protein production was quantified by ELISA, which showed that NG-709 produced each of the 4 encoded proteins (FIG. 7F).

[0635] In a fourth experiment, A549 lung carcinoma cells were seeded and infected with EnAd, NG-704, NG-706, NG-707 and NG-709 at 1ppc before harvesting and clarifying supernatants 72 hours later as described above. HEK-Blue IL-12 cells were seeded at 5×10⁴ cells per well in 96 well plates before being stimulated with supernatants (each pre-diluted 10-fold), or recombinant IL-12 (InvivoGen) at concentrations ranging from 100 to 1.6 ng/mL. Assay plates were incubated at 37° C., 5% CO2 for 20-24 hours before being centrifuged at 300×g for 5 minutes and removing clarified supernatant of which 20 μL was then transferred into a separate 96 well plate along with 180 μL of Quanti-Blue reagent Assay plates were incubated for 1 hour at 37° C. before analysing plates on a SpectraMax i3x plate reader with absorbance set to 620 nm. Data showed that NG-704 produced less functional IL-12 than the other IL-12 encoding viruses (FIG. 7G).

[0636] In a fifth experiment, A549 lung carcinoma cells were seeded and infected with NG-708 at 1ppc, and supernatants were harvested and clarified 96h later as described above. IL-12 p70, CCL21 and Flt3L transgene protein production was quantified by ELISA, which showed that NG-708 produced each of these 3 encoded proteins (FIG. 7H).

[0637] In a sixth experiment, A549 cells were seeded and infected with NG-708 or NG-709 at 10ppc, and supernatants were harvested and clarified after 72 hours as described above. IL-12, Flt3L, CCL19, CCL21, CCL5, IFNα and IL-18 transgene protein production was quantified by ELISA, which showed that NG-709 produced each of the 4 encoded proteins and NG-708 produced IL-12, CCL21 and Flt3L but CCL5 was not detected (ND) in this experiment (FIG. 7I).

[0638] In further experiments, other viruses depicted in FIG. 6 were used to infect A549 cells at 1ppc, and supernatants were harvested and clarified 96h later as described above and transgene protein production was quantified by ELISA. Levels of the different transgene proteins varied between different viruses, but IL-15 levels were consistently low or undetectable (FIG. 7J). For some of the viruses, some of the transgene protein levels were not determined (ND), or were tested but found to be below the lower limit of quantitation (LLOQ) of the assay.

### EXAMPLE 8: Production of IL-12 p70 by Viruses in Primary Human Tumour Samples

[0639] To evaluate virus and transgene protein activities using primary human tumour cells, surgically excised tumour samples were placed in Aqix organ transportation medium (supplemented with amphotericin B, penicillin, streptomycin, gentamycin and metronidazole) and shipped from the clinical site at 4° C. and obtained for processing in the laboratory within 24h. In two separate experiments, a colorectal tumour (CRC, tumour 68) and a kidney tumour (tumour 70) sample were cut into small pieces using scalpels and then enzymatically dissociated using a tumour dissociation mix (Miltenyi Biotech) on a Gentle MACS tissue disruptor (Miltenyi Biotech). Single cell suspensions were obtained by filtering and plated into 96 well or 24 well plates, depending on the cell yield in either RPMI (Gibco) supplemented with foetal bovine serum and insulin-transferrin or Cancer Cell Line Medium XF (PromoCell). Both media formulations were additionally supplemented with amphotericin B, penicillin and streptomycin. Cell types contained in these suspensions were routinely characterized by flow cytometry and shown to include tumour cells and different immune cell subsets, including T cells, B cells and NK cells. Single cell suspensions obtained from each tumour sample were either left uninfected, or infected with EnAd, NG-702 or NG-704 at 1000ppc. Recombinant proteins (IL-12 p70 at 15 ng/mL, IL-15 at 50 ng/mL, IL-18 at 50 ng/mL) were also added either alone, in combination or excluded to cover different permutations. Wells containing viruses expressing IL-12 were not supplemented with recombinant IL-12 p70. Supernatant samples were harvested and clarified as described in Example 7 at 48h (tumour 68) or 96h (tumour 70) post infection. IL-12 p70 protein was quantified by ELISA from supernatant samples from both experiments. ELISA data showed that both viruses encoding IL-12 produced IL-12 p70 protein from tumour 70, with NG-702 producing the most, while only NG-702 produced quantifiable levels from tumour 68 (FIG. 8A). Supernatant samples from tumour 70 cultures were also analysed by ELISA for the presence of IFNγ protein. The combination of IL-12+IL-15 stimulated the production of IFNγ both with recombinant IL-12, and where IL-12 was produced by cultures infected with NG-702 or NG-704. IL-12 alone, recombinant or encoded by NG-702 or NG-704, did not stimulate the production of IFNγ. In some cases, the addition of recombinant IL-18 to these cultures boosted IFNγ production further (FIG. 8B). No IL-15 alone control was included in this experiment, however the study summarised in FIG. 1A demonstrated that IL-15 alone induces similar levels of IFNγ to IL-12 alone, which in this study induced low or unquantifiable levels. The lower production of IFNγ from NG-704 infected wells correlate with the lower level of IL-12 production as compared to NG-702 in this experiment (FIG. 8A).

[0640] In a second experiment, tumour 70 cells and those from an additional dissociated CRC tumour (tumour 71) were both cultured and infected with NG-707 at 1000ppc. Supernatant and cell samples were harvested 3, 4, 5, 7 and 10 days post infection. Cells and supernatant samples were clarified and lysed as described previously. IL-12 p70 protein was quantified by ELISA from supernatant samples. ELISA data showed that NG-707 produced IL-12 p70 protein from both tumour samples at all measured time points (FIG. 8C).

[0641] In a third experiment, two breast tumour samples (tumour 66 and 67) were dissociated as described previously, cultured and either left uninfected (UIC), or infected with EnAd, NG-702, NG-704, NG-707 or NG-709 at 1000ppc. Supernatant and cell samples were harvested 4 days post infection. Supernatant samples were clarified as described previously. IL-12 p70 protein was quantified by ELISA from supernatant samples. ELISA data showed that NG-707 and NG-709 produced detectable IL-12 p70 protein from both tumour samples, while NG-702 only produced detectable protein from tumour 67, and NG-704 failed to produce detectable protein from either tumour sample (FIG. 8D).

[0642] In a fourth experiment, a colorectal tumour sample (tumour 75) was dissociated and cultured as described earlier and either left uninfected (UIC) or infected with NG-707 at 1ppc or 100ppc. Supernatant samples were harvested 1, 4, 6, 8 and 11 days post inoculation, clarified as described previously and IL-12 p70 protein quantified by ELISA. ELISA data showed that NG-707 produced detectable IL-12 p70 protein from day 4 at 100ppc, and from day 8 with 1ppc (FIG. 8E). Note: IL-12 protein detected at day 4 in the uninfected control is likely due to low level production by immune cells present in the heterogeneous mix of cells present in the tumour samples.

[0643] In a fifth experiment, a colorectal tumour sample (tumour 76) was dissociated and cultured as described earlier and either left uninfected (UIC) or infected with NG-707 at 1ppc or 1000ppc. Supernatant samples were harvested 1, 4, 6, 8 and 11 days post inoculation, clarified as described previously and IL-12 p70 protein quantified by ELISA. ELISA data showed that NG-707 produced detectable IL-12 p70 protein from day 1 at 1000ppc, and from day 4 with 1ppc (FIG. 8F).

[0644] In a sixth experiment, a colorectal tumour sample (tumour 79) was dissociated and cultured as described earlier and either left uninfected (UIC) or infected with NG-707 at 1ppc or 1000ppc. Supernatant samples were harvested 1, 4, 6, 8- and 11-days post inoculation, clarified as described previously and IL-12 p70 protein quantified by ELISA. ELISA data showed that NG-707 produced detectable IL-12 p70 protein from day 4 at 1000ppc, with 1ppc not leading to the production of detectable IL-12 at any time point (FIG. 8G).

[0645] In a seventh experiment, a primary renal cell carcinoma sample (tumour 70) was dissociated as described earlier and either left uninfected (UIC) or infected with NG-707 at 100ppc or 1000ppc. Supernatant samples were harvested 3, 4, 5, 7- and 10-days post inoculation, clarified as described previously and IL-12 p70 protein quantified by ELISA. Data showed that NG-707 produced detectable IL-12 p70 protein at higher levels with 1000ppc than with 100ppc (FIG. 8H).

### EXAMPLE 9: Activity of Viruses Encoding Human IL-15 Together with the IL-15 Binding Region of the Human IL-15 Receptor Alpha (IL-15Ra) in the Transgene Cassette

[0646] Functional signalling by IL-15 involves it binding first to IL-15Ra molecules which then together bind to cells bearing receptors comprising the common gamma chain (gc) and IL-2 receptor beta (IL-2Rb). To investigate the effect of encoding an IL-15 binding domain on the functional activity of an IL-15 transgene, a membrane-anchored form of the main IL-15 binding region of the IL-15Ra (the “Sushi” domain) was created by linking the sequence to the transmembrane region of the PDGF receptor via either a cMyc peptide or a Gly4Ser linker. These transgene sequences were used to create viruses NG-744 and NG-746, as well as NG-740 and NG-742 which also encode IL-15 (Table 3, FIG. 9A).

TABLE 3

| | |
|---|---|
| NG-740 | SSA¹-IL15RsushimycTM²⁷- |
| (SEQ ID NO. 89) | P2A³-IL15¹⁹-PA⁵ |
| | (SEQ ID NO. 48) |
| NG-742 | SSA¹-IL15RsushiG4STM²⁸- |
| (SEQ ID NO. 90) | P2A³-IL15¹⁹-PA⁵ |
| | (SEQ ID NO. 49) |
| NG-744 | SSA¹-IL15RsushiG4STM²⁸- |
| (SEQ ID NO. 91) | PA⁵ (SEQ ID NO. 50) |
| NG-746 | SSA¹-IL15RsushimycTM²⁷- |
| (SEQ ID NO. 92) | PA⁵ (SEQ ID NO. 51) |
| NG-748 | SSA¹-IL15Rsushi²⁹-P2A³- |
| (SEQ ID NO. 211) | IL15¹⁹-PA⁵ |
| | (SEQ ID NO. 167) |

¹SEQ ID NO. 1; ³SEQ ID NO. 4; ⁵SEQ ID NO. 8; ¹⁹SEQ ID NO. 21; ²⁷SEQ ID NO. 25; ²⁸SEQ ID NO. 29; ²⁹SEQ ID NO. 26

[0647] Viruses were produced and purified using the protocol described in Example 6.

[0648] In a first experiment, NG-740 inoculation of A549 cells led to increased IL-15 production by ELISA compared to other viruses (NG-757, NG-758, NG-759) encoding an IL-15 transgene but no IL-15Ra (FIG. 9B).

[0649] To evaluate the effect on IL_15 production of expressing either transmembrane-anchored or soluble secreted forms of IL-15Ra sushi domain, a transfection approach was first undertaken using pUC vectors expressing gene products under control of a CMV promoter. Transfection of HEK-293 cells with an IL-15 pUC vector alone or together with a separate vector expressing either the soluble secreted or transmembrane anchored forms of IL-15Ra sushi domain showed that either form of IL-15Ra increased production of IL-15 as measured by ELISA (FIG. 9C) or using a functional reporter assay (FIG. 9D). This reporter assay used HEK-BlueIL-2 cells (InVivogen) which, because HEK293 cells constitutively express native IL-15Ra on their cell surface, respond to IL-15 as well as IL-2 to produce the secreted alkaline phosphatase reporter protein that is measured using a colorimetric enzyme assay.

[0650] A further virus, NG-748, was then constructed and prepared (as in Example 6) that produced a soluble (secreted) version of the IL-15Ra sushi domain together with IL-15 (Table 3, FIG. 9A). Inoculation of A549 cells (FIG. 9E) or a primary colorectal tumour cell sample (FIG. 9F) with either NG-740 or NG-748 showed that both led to production of IL-15, as measured by ELISA, with higher levels produced with NG-748 which encodes the soluble secreted IL-15Ra sushi domain.

[0651] In another study, primary kidney tumour cells (tumour 101) were treated with NG-748 or NG-702, in the presence of different levels of added recombinant IL-12 or IL-15, respectively. Production of IFNg by the primary TILs in the cultures was measured by ELISA of culture supernatants. The data (FIG. 9G) show a strong, dose-dependent synergy of IFNg induction by the IL-15 producing NG-748 virus with added IL-12, and a similar dose-dependent synergy of the IL-12 producing virus NG-702 with added IL-15.

### EXAMPLE 10: Viruses Encoding IL-15Rsushi Designed to Secrete Both IL-12 and IL-15

[0652] Further viruses were designed to incorporated different forms of the IL-15Ra sushi domain together with both IL-12 and IL-15 transgenes. Viruses NG-785, NG-785A, NG-786A, NG-787 and NG-787A (Table 4; FIG. 10A) were produced and purified as described in Example 6.

TABLE 4

| | |
|---|---|
| NG-785 | SSA¹-IL12p40LinkerIL12p35⁶- |
| (SEQ ID NO. 219) | T2A¹¹-IL15RsushimycTM²⁷- |
| | P2A³-IL15¹⁹-PA⁵ (SEQ ID NO. 175) |
| NG-785A | SSA¹-IL12p40LinkerIL12p35⁶- |
| (SEQ ID NO. 20) | T2A¹¹-IL15RsushimycTM²⁷- |
| | P2A³-IL15¹⁹-PA⁵ (SEQ ID NO.176) |
| NG-786A | SSA¹-IL-12p40LinkerIL12p35⁶- |
| (SEQ ID NO. 221) | T2A¹¹-IL15Rsushi²⁹-P2A³- |
| | IL15¹⁹-PA⁵ (SEQ ID NO. 177) |
| NG-787 | SSA¹-IL12p40LinkerIL12p35⁶- |
| (SEQ ID NO. 222) | T2A¹¹-IL15Rsushi-Linker- |
| | IL15³⁰-PA⁵ (SEQ ID NO. 178) |
| NG-787A | SSA¹-IL12p40LinkerIL12p35⁶- |
| (SEQ ID NO 223) | T2A¹¹-IL15Rsushi-Linker- |
| | IL15³⁰-PA⁵ (SEQ ID NO. 179) |

¹SEQ ID NO. 1; ³SEQ ID NO. 4; ⁵SEQ ID NO. 8; ⁶SEQ ID NO. 11; ¹¹SEQ ID NO. 5; ¹⁹SEQ ID NO. 21; ²⁷SEQ ID NO. 25; ²⁹SEQ ID NO. 26; ³⁰SEQ ID NO. 236

[0653] To assess transgene protein production by these viruses, A549 cells were infected with 1ppc of viruses and supernatants collected after 96h for testing in ELISA and functional reporter assays for IL-12 and IL-15. ELISA data showed good expression levels of IL-12 and IL-15 from all five viruses, with the exception of a very low level of IL-12 being produced by NG-785 (FIG. 10B). Testing different dilutions of these same supernatants in IL-12 and IL-15 functional reporter assays (as described in Example 5 and Example 9) generated data that aligned with the ELISA results, demonstrating functionality of the transgene proteins made (FIG. 10C).

[0654] In a second study, A549 cells left untreated or inoculated with 1ppc of EnAd, NG-740, NG-748 or the viruses listed in Table 4 and PBMCs added after 24h to assess the ability of cytokines produced by the viruses to stimulate immune cell responses. Supernatants were then collected after 72h and assessed by ELISA for levels of IL-12 and IL-15 transgene protein as well as IFNg produced by the added immune cells. The data showed that the five viruses expressing both IL-12 and IL-15 with IL-15Rsushi variants induced much higher IFNg production than NG-740 and NG-748 which only express IL-15 with IL-15Rsushi variants not IL-12 (FIG. 10D).

[0655] A further experiment, A549 cells were inoculated with 1ppc of NG-785A, NG-786A or NG-787A or controls and after 24 hours culture, human CD3+ T-cells (purified from PBMCs) were added and at 72 hours culture supernatants were assessed for IFNg levels by ELISA as a functional assessment of the transgene protein production by the viruses. All three transgene bearing viruses produced their encoded IL-12 and IL-15 proteins leading to the production of high levels of IFNg, indicating activation of the added T-cells, whereas the control virus EnAd did not (FIG. 10E).

[0656] A further experiment with these same three viruses compared culture conditions where the virus-inoculated A549 tumour cells were in contact with the added responder T-cells with culturing in a transwell plate where the T-cells are separated from the virus inoculated tumour cells to remove direct contact between them. This enabled a comparison of the T-cell activation achieved when the IL-15Rsushi transgene protein can move across the transwell filter along with the IL-12 and IL-15 transgene proteins (NG-786A) with the IL-15Rsushimyc™ which cannot (NG-785A) as it stays in the membrane of the incoculated tumour cells. EnAd or EnAd with recombinant IL-12 and IL-15 added were used as comparator controls. Viruses were used at 1ppc and T-cells added to the two culture types 24h later. IFNg in the T-cell culture supernatants measured by ELISA shows that when the T-cells are separated from the transgene protein producing tumour cells, using a secreted version of the IL-15Ra sushi domain (NG-786A) led to higher levels of activation compared to the transmembrane IL-15Ra sushi domain form (NG-785A) and also higher than achieved without an IL-15Ra transgene as shown using EnAd inoculation with recombinant IL-12 and IL-15 (FIG. 10F).

[0657] In a similar study to that shown in FIG. 10D, either PBMCs or purified T-cells were added to assess IL-12/IL-15 mediated immune cell activation. The data again showed that all five transgene-bearing viruses tested led to activation of IFNg production (FIG. 10G).

### EXAMPLE 11: Evaluation of Activity of Viruses IL-12, IL-15 and IL-5Rsushi in Primary Human Tumour Cell Cultures

[0658] Primary human tumour samples from two colorectal cancer patients were processed and cultured as described in Example 1. Replicate cultures were inoculated with 1000ppc of EnAd, NG-785A, NG-786A or NG-787A, or left untreated. After 72h (Tumour 98, Figure A) or 96h (Tumour 99, FIG. 11B), supernatants were removed and levels IFNg were measured by ELISA as a measure of activation of the endogenous tumour infiltrating lymphocytes in the tumour samples. As shown in FIG. 11, all the transgene-expressing viruses led to production of IL-12 and IL-15 by the primary tumour cells and all led to stimulation of IFNg production.

### EXAMPLE 12: Generation and Characterization of IL-5Rsushi, IL-12 and IL-15 Viruses Additionally Expressing a Fourth Transgene

[0659] A further set of viruses having IFNα, CXCL9 or CCL21 as an additional one or two transgenes encoded in the transgene cassette along with IL-5Rsushi, IL-12 and IL-15 were designed produced as described in Example 6 (Table 5; FIG. 12A).

TABLE 5

| | |
|---|---|
| NG-788P | SSA¹-IL12p40LinkerIL12p35⁶-T2A¹¹- |
| (SEQ ID NO. 224) | CCL21²⁸-E2A¹²-IL15Rsushi²⁹-P2A³- |
| | IL15²⁵-PA⁵ (SEQ ID NO. 180) |
| NG-789P | SSA¹-IL12p40LinkerIL12p35⁶-T2A¹¹- |
| (SEQ ID NO. 225) | CXCL9¹³-E2A¹²-IL15Rsushi²⁹-P2A³- |
| | IL15²⁵-PA⁵ (SEQ ID NO. 181) |
| NG-790P | SSA¹-IL12p40LinkerIL12p35⁶-T2A¹¹ |
| (SEQ ID NO. 226) | -CXCL9¹³-F2A¹⁴-CCL21²⁸-E2A¹²- |
| | IL15Rsushi²⁹-P2A³-IL15²⁵-PA⁵ |
| | (SEQ ID NO. 182) |
| NG-791A | SSA¹-IL12p40LinkerIL12p35⁶-T2A¹¹- |
| (SEQ ID NO. 227) | CXCL9¹³-E2A¹²-IL15Rsushi²⁹-P2A³- |
| | IL15¹⁹-PA⁵ (SEQ ID NO. 183) |
| NG-792A | SSA¹-IL12p40LinkerIL12p35⁶-T2A¹¹- |
| (SEQ ID NO. 228) | IFNa⁸-E2A¹²-IL15Rsushi²⁹-P2A3_ |
| | IL15¹⁹-PA⁵ (SEQ ID NO. 184) |
| NG-794A | SSA¹-CXCL9¹³-E2A¹²-IL12p40Linker |
| (SEQ ID NO. 229) | IL12p35⁶-T2A¹¹-IL15Rsushi²⁹-P2A3_ |
| | IL15¹⁹-PA⁵ (SEQ ID NO. 185) |
| NG-795A | SSA¹-IL12p40LinkerIL12p35⁶-T2A¹¹- |
| (SEQ ID NO. 230) | CCL21²⁸-E2A¹²- |
| | IL15RsushimycTM²⁷-P2A³-IL15¹⁹-PA⁵ |
| | (SEQ ID NO. 186) |
| NG-796A | SSA¹-IL12p40LinkerIL12p35⁶-T2A¹¹- |
| (SEQ ID NO. 231) | CCL21²⁸-E2A¹²-IL15Rsushi²⁹-P2A³- |
| | IL15¹⁹-PA⁵ (SEQ ID NO. 187) |
| NG-799A | SSA¹-CCL21²⁸-E2A¹²-IL15Rsushi²⁹- |
| (SEQ ID NO 232) | P2A³- IL15¹⁹-T2A¹¹- |
| | IL12p40LinkerIL12p35⁶-PA⁵ |
| | (SEQ ID NO. 188) |

¹SEQ ID NO. 1; ³SEQ ID NO. 4; ⁵SEQ ID NO. 8; ⁶SEQ ID NO. 11; ⁸SEQ ID NO. 13; ¹¹SEQ ID NO. 5; 12 SEQ ID NO. 6; ¹³SEQ ID NO. 16; ¹⁴SEQ ID NO. 7; ¹⁹SEQ ID NO. 21; ²⁵SEQ ID NO. 163; ²⁷SEQ ID NO. 25; ²⁸SEQ ID NO. 17; ²⁹SEQ ID NO. 26

[0660] Viruses NG-788P, NG-794A, NG-795A, NG-796A and NG-799A were characterized for production of their transgene proteins, by specific ELISA assays, by infecting A549 cells, with uninfected (UIC) or EnAd infected A549 cells serving as controls. With the exception of NG-799A, all viruses made detectable levels of all their encoded transgene proteins, with IL-15 levels being notably higher with NG-794A and NG-796A (FIG. 12B). NG-799A did not make detectable levels of CCL21 and the level of IL-15 was also low.

[0661] In a similar second study, the same 5 viruses were tested alongside the viruses listed in Table 4, Example 10 to compare the levels of IL-15 transgene protein produced by viruses co-expressing IL-12 and IL-15 with IL-15Rsushi. The IL-15 ELISA data from the A549 cell culture supernatants (FIG. 12C) shows detectable IL-15 from all the viruses, with the highest levels from using NG-794A and NG-796A.

[0662] NG-794A and NG-796A were then tested for their effects on primary human tumour cell cultures established as described in Example 1 using a colorectal tumour sample (tumour 105) inoculated with viruses at 1000ppc and supernatants collected for cytokine analyses by ELISA after 48h. The data (FIG. 12D) show that both transgene-bearing viruses produced their respective transgenes and led to the activation of IFNg production.

[0663] In a similar study, a different colorectal tumour sample (tumour 107) was treated with NG-786A or NG-796A and compared to EnAd or no treatment. As shown in FIG. 12E, both transgene-bearing viruses produced their transgene proteins and led to activation of IFNg production by these primary tumour cells.

[0664] In a further study, another colorectal tumour sample (tumour 112) was treated with NG-786A, NG-791A, NG-794A or NG-796A and compared to EnAd or no treatment. As shown in FIG. 12F, all transgene-bearing viruses produced their transgene proteins and led to activation of IFNg production by these primary tumour cells.

[0665] The production of IFNg by PBMC-derived T-cells or primary tumour cell cultures served to test the functionality of the IL12 and IL-15/IL-15Rsushi transgene proteins. To demonstrate functionality of the CCL21 transgene product, monocyte-derived dendritic cells prepared from PBMCs (by culturing them with GM-CSF and IL-4 as described in Example 3) were stimulated with LPS for 24 before using in a transwell migration assay. The assay was run using an 8 mm pore-size transwell coated with 500 mg/mL Matrigel, as described in Example 3. Culture supernatants from uninfected A549 cells or A549 cells treated with EnAd or NG-795A were placed in the bottom well, with or without a blocking antibody to CCL21 (pre-incubated for 1 hour at room temperature) and dendritic cells added to the top wells. After 12h of culture, the numbers of dendritic cells that had migrated into the lower chamber were measured by flow cytometry. The data in FIG. 12G show that dendritic cell migration was increased selectively by the CCL21-containing supernatant from NG-795A and this was inhibited by the anti-CCL21 antibody, showing that the CCL21 transgene product is functional as a chemokine for dendritic cells. Similar data were also obtained from a repeat experiment where the dendritic cells were labelled with 1 mM Cell Tracer Violet (Invitrogen) after LPS stimulation and prior to use in the migration assay, and an isotype matched antibody was also included as an irrelevant antibody control to demonstrate the specificity of the migration inhibition by anti-CCL21 (FIG. 12H).

### EXAMPLE 13: Production of IL-12 p70 by Viruses in In Vivo Mouse Studies

[0666] To systemically evaluate virus and transgene protein production and activities we set up in vivo study in which SCID mice were subcutaneously implanted in one flank with A549 cells (2 million cells mixed with Matrigel, 50:50 ratio). Once tumours reached a volume of ˜200 m m³, mice were randomised into different groups (7mice per group) and treated intravenously on each of day 0, 2 and 5, with 5×10⁹ virus particles of EnAd, NG-786A, NG-791A or NG-796A viruses (or PBS in the ‘no virus’ control). On day 7, a cocktail of labelled cells (effector memory and naïve T cells isolated from PBMCs from healthy donors—using Miltenyi specific kits) responsive to CXCL9 and CCL21 chemokine gradients was injected intravenously. After 48 hours tumour xenografts were analysed for T cell infiltration, transgene RNA expression and chemokine protein expression by ELISA and plasma samples were analysed for IL-12 transgene protein production by ELISA.

[0667] The data in FIG. 13 show that IL-12p70 was found in the blood of all mice treated with IL-12 transgene-encoding viruses, indicating that the viruses had infected tumour cells and expressed the encoded transgenes.

### EXAMPLE 14: In Vitro Migration of Dendritic Cells in Response to CCL21

[0668] To demonstrate functionality of the CCL21 transgene produced by NG-796A virus, monocyte-derived dendritic cells prepared from PBMCs (by culturing them with GM-CSF and IL-4 as described in Example 3) were stimulated with LPS for 24 before using in a transwell migration assay as described for NG-795A in Example 12. The data in FIG. 15 show that dendritic cell migration was selectively increased by the CCL21-containing supernatant from NG-796A, compared to supernatants from uninfected (UIC) or EnAd infected cells and this was inhibited by the presence of anti-CCL21 blocking antibody (but not by its isotype control).

### EXAMPLE 15: NG-704 and NG-796A Synergy with CAR-T Cells in an In Vivo Mouse Tumour Xenograft Model

[0669] To evaluate virus and transgene activities in a human tumor xenograft system, we set up an in vivo study in which NSG mice were subcutaneously implanted in one flank with 5×10⁶ A549 cells (HER-2 positive). Once tumours reached a volume of ˜200 mm³, mice were randomised into different groups (5 mice per group) and treated intravenously on each of day 0, 3 with 5×10⁹ virus particles of EnAd, NG-704 or NG-796A viruses (or PBS in the ‘CAR-T only’ control). On day 6, 1×10⁷ HER-2 specific CAR-T cells (ProMab) were injected intravenously. Tumours were measured twice per week and tumour growth was followed until the end of the study (˜90 days). The data in FIGS. 16A&B show that CAR-T cells synergised with both NG-704 and NG-796A, respectively, leading to long-term clearance of the tumours. EnAd-treatment only delayed tumour growth compared to CAR-T cells only, indicating that the transgenes encoded by NG-704 and NG-796A are important for anti-tumour activity in the presence of tumour antigen (HER-2)-specific CAR-T cells

### EXAMPLE 16: NG-796A Mediated Production of CCL21 in Human Tumour Xenografts

[0670] SCID mice were subcutaneously implanted in one flank with A549 cells (2 million cells mixed with Matrigel, 50:50 ratio). Once tumours reached a volume of ˜200 mm³, mice were randomised into two different groups (8 mice per group) and treated intravenously on each of day 0, 1 and 3, with 5×10⁹ virus particles of EnAd or NG-796A viruses. On day 15, plasma and tumours were collected, tumours lysed and samples analysed for CCL21. by ELISA. The data in FIG. 16C show that CCL21 was found in all of the tumours from mice treated with NG-796A, indicating that the viruses had infected tumour cells and expressed the encoded transgenes. No CCL21 was detected in any plasma samples, indicating that a CCL21 chemokine gradient had been established in the tumours of NG-796A treated mice).

### EXAMPLE 17: Production of IL15-Ra Sushi Domain in Tumour Cell Cultures Infected with NG-796A Virus

[0671] A recombinant IL-15Ra sushi domain protein, including the C-terminal P2A peptide and an added N-terminal His tag (SEQ ID NO: 244), was produced and purified by standard E. coli protein expression and purification techniques (Native Antigen Company, Oxford, UK). This recombinant protein was used as a standard in ELISAs for detecting IL-15Ra sushi domain production in transfection and virus infection experiments.

[0672] Secretion of IL-15Ra sushi domain (alongside the other encoded transgenes) in supernatants of A549 cells infected with NG-796A virus (or EnAd as a control) was characterised by ELISA (as described in Example 12) using a standard curve of recombinant IL-15Ra sushi domain protein. Results shown in FIG. 17 show that the IL-15Ra sushi domain protein is produced and secreted at similar levels to those of IL-15 cytokine.

### EXAMPLE 18: IL15-Ra Sushi Domain Enhances IL-15 Secretion

[0673] To assess the role of IL-15Ra sushi domain and support its role in the NG-796A virus sequence, we performed transfection experiments using pUC vectors bearing transgene cassettes under control of a CMV promoter, following a similar approach to that described in Example 9. A549 cells were transfected with either pUC-796A (having the transgene cassette sequence of NG-796A; SEQ ID NO: 245) or pRES-128 (a version which lacks the IL-15Ra sushi domain sequence; SEQ ID NO: 246) (see FIG. 18B). Secreted IL-15 cytokine in supernatants was quantified by ELISA. Results shown in FIG. 18A show that encoding the IL-15Ra sushi domain for production by the virus infected cells markedly enhances IL-15 secretion. Addition of recombinant IL-15Ra sushi domain to the cultures, enabling it to interact with any IL-15 released by the cells, led to a small increase in detectable IL-15 indicating that in addition to promoting IL-15 secretion from the cells it may also increase IL-15 stability.

1-29. (canceled)

30. A group B adenovirus comprising a sequence of formula (I):
5′ITR-B₁-B_{A}-B₂-B_{X}-B_{B}-B_{Y}-B₃-3′ITR (I)
wherein:
B₁ is a bond or comprises: E1A, E1 B or E1A-E1 B;
B_{A} comprises-E2B-L1-L2-L3-E2A-L4;
B₂ is a bond or comprises: E3;
B_{X} is a bond or a DNA sequence comprising: a restriction site, one or more transgenes or both;
B_{B} comprises L5;
B_{Y} comprises a sequence -G1-G2ₙ-G3ₘ-G4ₚ-G5_{q},
wherein: G1 is a first transgene; G2 is a second transgene; G3 is a third transgene;
G4 is a fourth transgene; G5 is a fifth transgene,
B₃ is a bond or comprises: E4;
n is 0 or 1; m is 0 or 1; p is 0 or 1; q is 1;
B₃ is a bond or comprises: E4;
wherein:
IL-15 is encoded as a transgene in position G5,
characterised in that B_{Y} also encodes a polypeptide comprising the sushi domain of IL-15R alpha, and does not comprise a transmembrane or GPI anchor such that it is not membrane anchored when expressed.

31. A group B adenovirus according to claim 30, wherein the polypeptide encoding the sushi domain does not comprise a transmembrane domain or GPI anchor.

32. A group B adenovirus according to claim 30, wherein p is 1 and the polypeptide comprising the IL-15R alpha sushi domain is encoded in G4.

33. A group B adenovirus according to claim 30, wherein the leader sequence as employed for IL-15 is the non-native sequence selected independently from Ig, CD33 or IL-2 leader sequence.

34. A group B adenovirus according to claim 30, wherein the virus also encodes IL-12.

35. A group B adenovirus according to claim 34, wherein IL-12 has a sequence shown in SEQ ID NO: 115.

36. A group B adenovirus according to claim 34, wherein IL-12 is encoded in G1 or G2.

37. A group B adenovirus according to claim 30, where at least one further cytokine is encoded in B_{Y}.

38. A group B adenovirus according to claim 30, wherein B_{Y} encodes at least one chemokine.

39. A group B adenovirus according to claim 38, wherein the chemokine is selected from CXCL9, CCL19 and CCL21.

40. A group B adenovirus according to claim 38, wherein the chemokine is encoded in G1, G2 and/or G3.

41. A group B adenovirus according to claim 30, wherein m is 0.

42. A group B adenovirus according to claim 30, wherein the one or more transgenes (such as all transgenes) in B_{Y} are under the control of the major later promoter.

43. A group B adenovirus according to claim 30 wherein the virus comprises a DNA sequence encoding a protein sequence selected from SEQ ID NO: 175 to 189.

44. A composition comprising a group B adenovirus according to claim 30 and a pharmaceutically acceptable excipient, diluent or carrier.

45. A method of treating cancer, comprising administering a therapeutically effective amount of a group B adenovirus according to claim 30.

46. A combination therapy comprising a virus according to claim 30 and a cellular therapy.

The application's sequence listing, which the Patent Office published only in electronic form, follows.

SEQUENCE LISTING (246 sequences)

SEQ ID NO: 1 - skipped

SEQ ID NO: 2 - DNA, 14 bp, Artificial Sequence
  SPLICE ACCEPTOR SEQUENCE
tttctctcttcagg

SEQ ID NO: 3 - DNA, 26 bp, Artificial Sequence
  SPLICE ACCEPTOR SEQUENCE
tgctaatcttcctttctctcttcagg

SEQ ID NO: 4 - protein, 22 aa, Artificial Sequence
  High efficiency self-cleavable P2A peptide sequence
GSGATNFSLLKQAGDVEENPGP

SEQ ID NO: 5 - protein, 21 aa, Artificial Sequence
  High efficiency self-cleavable T2A peptide sequence
GSGEGRGSLLTCGDVEENPGP

SEQ ID NO: 6 - protein, 23 aa, Artificial Sequence
  High efficiency self-cleavable E2A peptide sequence
GSGQCTNYALLKLAGDVESNPGP

SEQ ID NO: 7 - protein, 25 aa, Artificial Sequence
  High efficiency self-cleavable F2A peptide sequence
GSGVKQTLNFDLLKLAGDVESNPGP

SEQ ID NO: 8 - DNA, 192 bp, Artificial Sequence
  poly adenylation (PA) sequence (SV40 late polyA sequence)
cagacatgataagatacattgatgagtttggacaaaccacaactagaatgcagtgaaaaaaatgctttatttgtgaaatttgtgatgctattgctttatttgtaaccattataagctgcaataaacaagttaacaacaacaattgcattcattttatgtttcaggttcagggggaggtgtgggaggtttttt

SEQ ID NO: 9 - protein, 219 aa, Artificial Sequence
  IL-12 p35 protein with signal sequence (IL12p35)
MCPARSLLLVATLVLLDHLSLARNLPVATPDPGMFPCLHHSQNLLRAVSNMLQKARQTLEFYPCTSEEIDHEDITKDKTSTVEACLPLELTKNESCLNSRETSFITNGSCLASRKTSFMMALCLSSIYEDLKMYQVEFKTMNAKLLMDPKRQIFLDQNMLAVIDELMQALNFNSETVPQKSSLEEPDFYKTKIKLCILLHAFRIRAVTIDRVMSYLNAS

SEQ ID NO: 10 - protein, 327 aa, Artificial Sequence
  IL-12 p40 protein with signal sequence (IL12p40)
CHQQLVISWFSLVFLASPLVAIWELKKDVYVVELDWYPDAPGEMVVLTCDTPEEDGITWTLDQSSEVLGSGKTLTIQVKEFGDAGQYTCHKGGEVLSHSLLLLHKKEDGIWSTDILKDQKEPKNKTFLRCEAKNYSGRFTCWWLTTISTDLTFSVKSSRGSSDPQGVTCGAATLSAERVRGDNKEYEYSVECQEDSACPAAEESLPIEVMVDAVHKLKYENYTSSFFIRDIIKPDPPKNLQLKPLKNSRQVEVSWEYPDTWSTPHSYFSLTFCVQVQGKSKREKKDRVFTDKTSATVICRKNASISVRAQDRYYSSSWSEWASVPCS

SEQ ID NO: 11 - protein, 540 aa, Artificial Sequence
  IL-12 p70 single chain protein with a (Gly4Ser)3 linker joining the IL12p40 protein with its signal sequence N-terminal to the IL12p35 protein without its signal sequence (IL12p40LinkerIL12p35)
MCHQQLVISWFSLVFLASPLVAIWELKKDVYVVELDWYPDAPGEMVVLTCDTPEEDGITWTLDQSSEVLGSGKTLTIQVKEFGDAGQYTCHKGGEVLSHSLLLLHKKEDGIWSTDILKDQKEPKNKTFLRCEAKNYSGRFTCWWLTTISTDLTFSVKSSRGSSDPQGVTCGAATLSAERVRGDNKEYEYSVECQEDSACPAAEESLPIEVMVDAVHKLKYENYTSSFFIRDIIKPDPPKNLQLKPLKNSRQVEVSWEYPDTWSTPHSYFSLTFCVQVQGKSKREKKDRVFTDKTSATVICRKNASISVRAQDRYYSSSWSEWASVPCSGGGGSGGGGSGGGGSRNLPVATPDPGMFPCLHHSQNLLRAVSNMLQKARQTLEFYPCTSEEIDHEDITKDKTSTVEACLPLELTKNESCLNSRETSFITNGSCLASRKTSFMMALCLSSIYEDLKMYQVEFKTMNAKLLMDPKRQIFLDQNMLAVIDELMQALNFNSETVPQKSSLEEPDFYKTKIKLCILLHAFRIRAVTIDRVMSYLNAS

SEQ ID NO: 12 - protein, 540 aa, Artificial Sequence
  IL-12 p70 single chain protein with a (Gly4Ser)3 linker joining the IL12p35 protein with its signal sequence N-terminal to the IL12p40 protein without its signal sequence (IL12p35LinkerIL12p40)
MCPARSLLLVATLVLLDHLSLARNLPVATPDPGMFPCLHHSQNLLRAVSNMLQKARQTLEFYPCTSEEIDHEDITKDKTSTVEACLPLELTKNESCLNSRETSFITNGSCLASRKTSFMMALCLSSIYEDLKMYQVEFKTMNAKLLMDPKRQIFLDQNMLAVIDELMQALNFNSETVPQKSSLEEPDFYKTKIKLCILLHAFRIRAVTIDRVMSYLNASGGGGSGGGGSGGGGSIWELKKDVYVVELDWYPDAPGEMVVLTCDTPEEDGITWTLDQSSEVLGSGKTLTIQVKEFGDAGQYTCHKGGEVLSHSLLLLHKKEDGIWSTDILKDQKEPKNKTFLRCEAKNYSGRFTCWWLTTISTDLTFSVKSSRGSSDPQGVTCGAATLSAERVRGDNKEYEYSVECQEDSACPAAEESLPIEVMVDAVHKLKYENYTSSFFIRDIIKPDPPKNLQLKPLKNSRQVEVSWEYPDTWSTPHSYFSLTFCVQVQGKSKREKKDRVFTDKTSATVICRKNASISVRAQDRYYSSSWSEWASVPCS

SEQ ID NO: 13 - protein, 187 aa, Artificial Sequence
  Interferon alpha 2 protein sequence
ALTFALLVALLVLSCKSSCSVGCDLPQTHSLGSRRTLMLLAQMRRISLFSCLKDRHDFGFPQEEFGNQFQKAETIPVLHEMIQQIFNLFSTKDSSAAWDETLLDKFYTELYQQLNDLEACVIQGVGVTETPLMKEDSILAVRKYFQRITLYLKEKKYSPCAWEVVRAEIMRSFSLSTNLQESLRSKE

SEQ ID NO: 14 - protein, 179 aa, Artificial Sequence
  Fms-related tyrosine kinase 3 ligand (Flt3L) soluble extracellular domain protein sequence
MTVLAPAWSPTTYLLLLLLLSSGLSGTQDCSFQHSPISSDFAVKIRELSDYLLQDYPVTVASNLQDEELCGGLWRLVLAQRWMERLKTVAGSKMQGLLERVNTEIHFVTKCAFQPPPSCLRFVQTNISRLLQETSEQLVALKPWITRQNFSRCLELQCQPDSSTLPPPWSPRPLEATAP

SEQ ID NO: 15 - protein, 92 aa, Artificial Sequence
  MIP1alpha LD78beta (MIP1a) protein sequence
QVSTAALAVLLCTMALCNQVLSAPLAADTPTACCFSYTSRQIPQNFIADYFETSSQCSKPSVIFLTKRGRQVCADPSEEWVQKYVSDLELSA

SEQ ID NO: 16 - protein, 124 aa, Artificial Sequence
  CXCL9 protein sequence
KKSGVLFLLGIILLVLIGVQGTPVVRKGRCSCISTNQGTIHLQSLKDLKQFAPSPSCEKIEIIATLKNGVQTCLNPDSADVKELIKKWEKQVSQKKKQKNGKKHQKKKVLKVRKSQRSRQKKTT

SEQ ID NO: 17 - protein, 134 aa, Artificial Sequence
  CCL21 protein sequence
MAQSLALSLLILVLAFGIPRTQGSDGGAQDCCLKYSQRKIPAKVVRSYRKQEPSLGCSIPAILFLPRKRSQAELCADPKELWVQQLMQHLDKTPSPQKPAQGCRKDRGASKTGKKGKGSKGCKRTERSQTPKGP

SEQ ID NO: 18 - protein, 91 aa, Artificial Sequence
  CCL5 protein sequence
MKVSAAALAVILIATALCAPASASPYSSDTTPCCFAYIARPLPRAHIKEYFYTSGKCSNPAVVFVTRKNRQVCANPEKKWVREYINSLEMS

SEQ ID NO: 19 - protein, 98 aa, Artificial Sequence
  CCL19 protein sequence
MALLLALSLLVLWTSPAPTLSGTNDAEDCCLSVTQKPIPGYIVRNFHYLLIKDGCRVPAVVFTTLRGRQLCAPPDQPWVERIIQRLQRTSAKMKRRSS

SEQ ID NO: 20 - protein, 193 aa, Artificial Sequence
  IL-18 long isoform
MAAEPVEDNCINFVAMKFIDNTLYFIAEDDENLESDYFGKLESKLSVIRNLNDQVLFIDQGNRPLFEDMTDSDCRDNAPRTIFIISMYKDSQPRGMAVTISVKCEKISTLSCENKIISFKEMNPPDNIKDTKSDIIFFQRSVPGHDNKMQFESSSYEGYFLACEKERDLFKLILKKEDELGDRSIMFTVQNED

SEQ ID NO: 21 - protein, 132 aa, Artificial Sequence
  Human IL-15 protein with N-terminal human Ig leader sequence
DWTWRILFLVAAATGAHSNWVNVISDLKKIEDLIQSMHIDATLYTESDVHPSCKVTAMKCFLLELQVISLESGDASIHDTVENLIILANNSLSSNGNVTESGCKECEELEEKNIKEFLQSFVHIVQMFINTS

SEQ ID NO: 22 - protein, 18 aa, Artificial Sequence
  Ig leader peptide sequence
DWTWRILFLVAAATGAHS

SEQ ID NO: 23 - protein, 114 aa, Artificial Sequence
  IL-15 protein sequence without leader sequence
NWVNVISDLKKIEDLIQSMHIDATLYTESDVHPSCKVTAMKCFLLELQVISLESGDASIHDTVENLIILANNSLSSNGNVTESGCKECEELEEKNIKEFLQSFVHIVQMFINTS

SEQ ID NO: 24 - protein, 101 aa, Artificial Sequence
  CCL21 C-terminally truncated protein sequence (CCL21t)
AQSLALSLLILVLAFGIPRTQGSDGGAQDCCLKYSQRKIPAKVVRSYRKQEPSLGCSIPAILFLPRKRSQAELCADPKELWVQQLMQHLDKTPSPQKPAQG

SEQ ID NO: 25 - protein, 155 aa, Artificial Sequence
  Human IL-15 receptor alpha Sushi domain protein sequence, with IL-15 receptor alpha leader sequence at N-terminus, with a C-terminal myc peptide linking it to a PDGF receptor transmembrane domain (IL15RsushimycTM)
MAPRRARGCRTLGLPALLLLLLLRPPATRGITCPPPMSVEHADIWVKSYSLYSRERYICNSGFKRKAGTSSLTECVLNKATNVAHWTTPSLKCIRDEQKLISEEDLAVGQDTQEVIVVPHSLPFKVVVISAILALVVLTIISLIILIMLWQKKPR

SEQ ID NO: 26 - protein, 96 aa, Artificial Sequence
  Human IL-15 receptor alpha Sushi domain protein sequence with IL-15 receptor alpha leader sequence at N-terminus
MAPRRARGCRTLGLPALLLLLLLRPPATRGITCPPPMSVEHADIWVKSYSLYSRERYICNSGFKRKAGTSSLTECVLNKATNVAHWTTPSLKCIRD

SEQ ID NO: 27 - protein, 10 aa, Artificial Sequence
  Myc peptide sequence
EQKLISEEDL

SEQ ID NO: 28 - protein, 49 aa, Artificial Sequence
  PDGF receptor transmembrane domain protein sequence
AVGQDTQEVIVVPHSLPFKVVVISAILALVVLTIISLIILIMLWQKKPR

SEQ ID NO: 29 - protein, 150 aa, Artificial Sequence
  Human IL-15 receptor alpha Sushi domain protein sequence, with IL-15 receptor alpha leader sequence at N-terminus, with a Gly4Ser C-terminal peptide sequence linking it to a PDGF receptor transmembrane domain (IL15RsushiG4STM)
MAPRRARGCRTLGLPALLLLLLLRPPATRGITCPPPMSVEHADIWVKSYSLYSRERYICNSGFKRKAGTSSLTECVLNKATNVAHWTTPSLKCIRDGGGGSAVGQDTQEVIVVPHSLPFKVVVISAILALVVLTIISLIILIMLWQKKPR

SEQ ID NO: 30 - protein, 5 aa, Artificial Sequence
  Gly4Ser peptide linker sequence
GGGGS

SEQ ID NO: 31 - protein, 15 aa, Artificial Sequence
  (Gly4Ser)3 peptide linker sequence
GGGGSGGGGSGGGGS

SEQ ID NO: 32 - DNA, 399 bp, Artificial Sequence
  CCL21 coding DNA sequence encoding SEQ ID NO: 17
gctcagtcactggctctgagcctccttatcctggttctggcctttggcatccccaggacccaaggcagtgatggaggggctcaggactgttgcctcaagtacagccaaaggaagattcccgccaaggttgtccgcagctaccggaagcaggaaccaagcttaggctgctccatcccagctatcctgttcttgccccgcaagcgctctcaggcagagctatgtgcagacccaaaggagctctgggtgcagcagctgatgcagcatctggacaagacaccatccccacagaaaccagcccagggctgcaggaaggacaggggggcctccaagactggcaagaaaggaaagggctccaaaggctgcaagaggactgagcggtcacagacccctaaagggcca

SEQ ID NO: 33 - DNA, 399 bp, Artificial Sequence
  CCL21 modified codon sequence (CCL21mod) encoding same protein sequence as encoded by SEQ ID NO: 32
gcccaatctctcgcacttagtctgctcattctcgtgcttgctttcgggattccaagaactcagggaagcgacggcggtgcccaagattgctgtctgaaatatagtcagagaaaaatccctgctaaagtggttcggagttatcgcaaacaagagcccagtttggggtgttcaattcccgcaattctctttttaccacggaaacggtcccaagctgaactgtgcgctgatcctaaagaactgtgggtccaacagctcatgcaacaccttgataaaaccccttctccccaaaagcctgctcaagggtgtagaaaagatagaggagcttctaaaaccggtaaaaagggcaaagggtctaagggatgtaaaagaaccgaacgctcccaaactcccaagggcccc

SEQ ID NO: 34 - DNA, 303 bp, Artificial Sequence
  CCL21 coding sequence truncated at the 3' end to produce a C-terminally truncated protein sequence (SEQ ID NO: 24)
gctcagtcactggctctgagcctccttatcctggttctggcctttggcatccccaggacccaaggcagtgatggaggggctcaggactgttgcctcaagtacagccaaaggaagattcccgccaaggttgtccgcagctaccggaagcaggaaccaagcttaggctgctccatcccagctatcctgttcttgccccgcaagcgctctcaggcagagctatgtgcagacccaaaggagctctgggtgcagcagctgatgcagcatctggacaagacaccatccccacagaaaccagcccagggc

SEQ ID NO: 35 - DNA, 303 bp, Artificial Sequence
  CCL21 modified coding sequence truncated at the 3' end (CCL21tmod) to produce a C-terminally truncated protein sequence (SEQ ID NO: 24), the same protein sequence as encoded by SEQ ID NO: 34
gcccaatctctcgcacttagtctgctcattctcgtgcttgctttcgggattccaagaactcagggaagcgacggcggtgcccaagattgctgtctgaaatatagtcagagaaaaatccctgctaaagtggttcggagttatcgcaaacaagagcccagtttggggtgttcaattcccgcaattctctttttaccacggaaacggtcccaagctgaactgtgcgctgatcctaaagaactgtgggtccaacagctcatgcaacaccttgataaaaccccttctccccaaaagcctgctcaaggg

SEQ ID NO: 36 - protein, 749 aa, Artificial Sequence
  Protein sequence encoded by NG-704 transgene cassette
MCHQQLVISWFSLVFLASPLVAIWELKKDVYVVELDWYPDAPGEMVVLTCDTPEEDGITWTLDQSSEVLGSGKTLTIQVKEFGDAGQYTCHKGGEVLSHSLLLLHKKEDGIWSTDILKDQKEPKNKTFLRCEAKNYSGRFTCWWLTTISTDLTFSVKSSRGSSDPQGVTCGAATLSAERVRGDNKEYEYSVECQEDSACPAAEESLPIEVMVDAVHKLKYENYTSSFFIRDIIKPDPPKNLQLKPLKNSRQVEVSWEYPDTWSTPHSYFSLTFCVQVQGKSKREKKDRVFTDKTSATVICRKNASISVRAQDRYYSSSWSEWASVPCSGGGGSGGGGSGGGGSRNLPVATPDPGMFPCLHHSQNLLRAVSNMLQKARQTLEFYPCTSEEIDHEDITKDKTSTVEACLPLELTKNESCLNSRETSFITNGSCLASRKTSFMMALCLSSIYEDLKMYQVEFKTMNAKLLMDPKRQIFLDQNMLAVIDELMQALNFNSETVPQKSSLEEPDFYKTKIKLCILLHAFRIRAVTIDRVMSYLNASGSGATNFSLLKQAGDVEENPGPALTFALLVALLVLSCKSSCSVGCDLPQTHSLGSRRTLMLLAQMRRISLFSCLKDRHDFGFPQEEFGNQFQKAETIPVLHEMIQQIFNLFSTKDSSAAWDETLLDKFYTELYQQLNDLEACVIQGVGVTETPLMKEDSILAVRKYFQRITLYLKEKKYSPCAWEVVRAEIMRSFSLSTNLQESLRSKE

SEQ ID NO: 37 - protein, 749 aa, Artificial Sequence
  Protein sequence encoded by NG-706 transgene cassette
MALTFALLVALLVLSCKSSCSVGCDLPQTHSLGSRRTLMLLAQMRRISLFSCLKDRHDFGFPQEEFGNQFQKAETIPVLHEMIQQIFNLFSTKDSSAAWDETLLDKFYTELYQQLNDLEACVIQGVGVTETPLMKEDSILAVRKYFQRITLYLKEKKYSPCAWEVVRAEIMRSFSLSTNLQESLRSKEGSGATNFSLLKQAGDVEENPGPCHQQLVISWFSLVFLASPLVAIWELKKDVYVVELDWYPDAPGEMVVLTCDTPEEDGITWTLDQSSEVLGSGKTLTIQVKEFGDAGQYTCHKGGEVLSHSLLLLHKKEDGIWSTDILKDQKEPKNKTFLRCEAKNYSGRFTCWWLTTISTDLTFSVKSSRGSSDPQGVTCGAATLSAERVRGDNKEYEYSVECQEDSACPAAEESLPIEVMVDAVHKLKYENYTSSFFIRDIIKPDPPKNLQLKPLKNSRQVEVSWEYPDTWSTPHSYFSLTFCVQVQGKSKREKKDRVFTDKTSATVICRKNASISVRAQDRYYSSSWSEWASVPCSGGGGSGGGGSGGGGSRNLPVATPDPGMFPCLHHSQNLLRAVSNMLQKARQTLEFYPCTSEEIDHEDITKDKTSTVEACLPLELTKNESCLNSRETSFITNGSCLASRKTSFMMALCLSSIYEDLKMYQVEFKTMNAKLLMDPKRQIFLDQNMLAVIDELMQALNFNSETVPQKSSLEEPDFYKTKIKLCILLHAFRIRAVTIDRVMSYLNAS

SEQ ID NO: 38 - protein, 1213 aa, Artificial Sequence
  Protein sequence encoded by NG-707 transgene cassette
MTVLAPAWSPTTYLLLLLLLSSGLSGTQDCSFQHSPISSDFAVKIRELSDYLLQDYPVTVASNLQDEELCGGLWRLVLAQRWMERLKTVAGSKMQGLLERVNTEIHFVTKCAFQPPPSCLRFVQTNISRLLQETSEQLVALKPWITRQNFSRCLELQCQPDSSTLPPPWSPRPLEATAPGSGATNFSLLKQAGDVEENPGPQVSTAALAVLLCTMALCNQVLSAPLAADTPTACCFSYTSRQIPQNFIADYFETSSQCSKPSVIFLTKRGRQVCADPSEEWVQKYVSDLELSAGSGEGRGSLLTCGDVEENPGPALTFALLVALLVLSCKSSCSVGCDLPQTHSLGSRRTLMLLAQMRRISLFSCLKDRHDFGFPQEEFGNQFQKAETIPVLHEMIQQIFNLFSTKDSSAAWDETLLDKFYTELYQQLNDLEACVIQGVGVTETPLMKEDSILAVRKYFQRITLYLKEKKYSPCAWEVVRAEIMRSFSLSTNLQESLRSKEGSGQCTNYALLKLAGDVESNPGPKKSGVLFLLGIILLVLIGVQGTPVVRKGRCSCISTNQGTIHLQSLKDLKQFAPSPSCEKIEIIATLKNGVQTCLNPDSADVKELIKKWEKQVSQKKKQKNGKKHQKKKVLKVRKSQRSRQKKTTGSGVKQTLNFDLLKLAGDVESNPGPMCHQQLVISWFSLVFLASPLVAIWELKKDVYVVELDWYPDAPGEMVVLTCDTPEEDGITWTLDQSSEVLGSGKTLTIQVKEFGDAGQYTCHKGGEVLSHSLLLLHKKEDGIWSTDILKDQKEPKNKTFLRCEAKNYSGRFTCWWLTTISTDLTFSVKSSRGSSDPQGVTCGAATLSAERVRGDNKEYEYSVECQEDSACPAAEESLPIEVMVDAVHKLKYENYTSSFFIRDIIKPDPPKNLQLKPLKNSRQVEVSWEYPDTWSTPHSYFSLTFCVQVQGKSKREKKDRVFTDKTSATVICRKNASISVRAQDRYYSSSWSEWASVPCSGGGGSGGGGSGGGGSRNLPVATPDPGMFPCLHHSQNLLRAVSNMLQKARQTLEFYPCTSEEIDHEDITKDKTSTVEACLPLELTKNESCLNSRETSFITNGSCLASRKTSFMMALCLSSIYEDLKMYQVEFKTMNAKLLMDPKRQIFLDQNMLAVIDELMQALNFNSETVPQKSSLEEPDFYKTKIKLCILLHAFRIRAVTIDRVMSYLNAS

SEQ ID NO: 39 - protein, 1010 aa, Artificial Sequence
  Protein sequence encoded by NG-708 transgene cassette
MCHQQLVISWFSLVFLASPLVAIWELKKDVYVVELDWYPDAPGEMVVLTCDTPEEDGITWTLDQSSEVLGSGKTLTIQVKEFGDAGQYTCHKGGEVLSHSLLLLHKKEDGIWSTDILKDQKEPKNKTFLRCEAKNYSGRFTCWWLTTISTDLTFSVKSSRGSSDPQGVTCGAATLSAERVRGDNKEYEYSVECQEDSACPAAEESLPIEVMVDAVHKLKYENYTSSFFIRDIIKPDPPKNLQLKPLKNSRQVEVSWEYPDTWSTPHSYFSLTFCVQVQGKSKREKKDRVFTDKTSATVICRKNASISVRAQDRYYSSSWSEWASVPCSGGGGSGGGGSGGGGSRNLPVATPDPGMFPCLHHSQNLLRAVSNMLQKARQTLEFYPCTSEEIDHEDITKDKTSTVEACLPLELTKNESCLNSRETSFITNGSCLASRKTSFMMALCLSSIYEDLKMYQVEFKTMNAKLLMDPKRQIFLDQNMLAVIDELMQALNFNSETVPQKSSLEEPDFYKTKIKLCILLHAFRIRAVTIDRVMSYLNASGSGATNFSLLKQAGDVEENPGPMAQSLALSLLILVLAFGIPRTQGSDGGAQDCCLKYSQRKIPAKVVRSYRKQEPSLGCSIPAILFLPRKRSQAELCADPKELWVQQLMQHLDKTPSPQKPAQGCRKDRGASKTGKKGKGSKGCKRTERSQTPKGPGSGEGRGSLLTCGDVEENPGPMKVSAAALAVILIATALCAPASASPYSSDTTPCCFAYIARPLPRAHIKEYFYTSGKCSNPAVVFVTRKNRQVCANPEKKWVREYINSLEMSGSGQCTNYALLKLAGDVESNPGPMTVLAPAWSPTTYLLLLLLLSSGLSGTQDCSFQHSPISSDFAVKIRELSDYLLQDYPVTVASNLQDEELCGGLWRLVLAQRWMERLKTVAGSKMQGLLERVNTEIHFVTKCAFQPPPSCLRFVQTNISRLLQETSEQLVALKPWITRQNFSRCLELQCQPDSSTLPPPWSPRPLEATAP

SEQ ID NO: 40 - protein, 1085 aa, Artificial Sequence
  Protein sequence encoded by NG-709 transgene cassette
MALTFALLVALLVLSCKSSCSVGCDLPQTHSLGSRRTLMLLAQMRRISLFSCLKDRHDFGFPQEEFGNQFQKAETIPVLHEMIQQIFNLFSTKDSSAAWDETLLDKFYTELYQQLNDLEACVIQGVGVTETPLMKEDSILAVRKYFQRITLYLKEKKYSPCAWEVVRAEIMRSFSLSTNLQESLRSKEGSGATNFSLLKQAGDVEENPGPMALLLALSLLVLWTSPAPTLSGTNDAEDCCLSVTQKPIPGYIVRNFHYLLIKDGCRVPAVVFTTLRGRQLCAPPDQPWVERIIQRLQRTSAKMKRRSSGSGEGRGSLLTCGDVEENPGPMAAEPVEDNCINFVAMKFIDNTLYFIAEDDENLESDYFGKLESKLSVIRNLNDQVLFIDQGNRPLFEDMTDSDCRDNAPRTIFIISMYKDSQPRGMAVTISVKCEKISTLSCENKIISFKEMNPPDNIKDTKSDIIFFQRSVPGHDNKMQFESSSYEGYFLACEKERDLFKLILKKEDELGDRSIMFTVQNEDGSGQCTNYALLKLAGDVESNPGPMCHQQLVISWFSLVFLASPLVAIWELKKDVYVVELDWYPDAPGEMVVLTCDTPEEDGITWTLDQSSEVLGSGKTLTIQVKEFGDAGQYTCHKGGEVLSHSLLLLHKKEDGIWSTDILKDQKEPKNKTFLRCEAKNYSGRFTCWWLTTISTDLTFSVKSSRGSSDPQGVTCGAATLSAERVRGDNKEYEYSVECQEDSACPAAEESLPIEVMVDAVHKLKYENYTSSFFIRDIIKPDPPKNLQLKPLKNSRQVEVSWEYPDTWSTPHSYFSLTFCVQVQGKSKREKKDRVFTDKTSATVICRKNASISVRAQDRYYSSSWSEWASVPCSGGGGSGGGGSGGGGSRNLPVATPDPGMFPCLHHSQNLLRAVSNMLQKARQTLEFYPCTSEEIDHEDITKDKTSTVEACLPLELTKNESCLNSRETSFITNGSCLASRKTSFMMALCLSSIYEDLKMYQVEFKTMNAKLLMDPKRQIFLDQNMLAVIDELMQALNFNSETVPQKSSLEEPDFYKTKIKLCILLHAFRIRAVTIDRVMSYLNAS

SEQ ID NO: 41 - protein, 1207 aa, Artificial Sequence
  Protein sequence encoded by NG-720 transgene cassette
MCHQQLVISWFSLVFLASPLVAIWELKKDVYVVELDWYPDAPGEMVVLTCDTPEEDGITWTLDQSSEVLGSGKTLTIQVKEFGDAGQYTCHKGGEVLSHSLLLLHKKEDGIWSTDILKDQKEPKNKTFLRCEAKNYSGRFTCWWLTTISTDLTFSVKSSRGSSDPQGVTCGAATLSAERVRGDNKEYEYSVECQEDSACPAAEESLPIEVMVDAVHKLKYENYTSSFFIRDIIKPDPPKNLQLKPLKNSRQVEVSWEYPDTWSTPHSYFSLTFCVQVQGKSKREKKDRVFTDKTSATVICRKNASISVRAQDRYYSSSWSEWASVPCSGGGGSGGGGSGGGGSRNLPVATPDPGMFPCLHHSQNLLRAVSNMLQKARQTLEFYPCTSEEIDHEDITKDKTSTVEACLPLELTKNESCLNSRETSFITNGSCLASRKTSFMMALCLSSIYEDLKMYQVEFKTMNAKLLMDPKRQIFLDQNMLAVIDELMQALNFNSETVPQKSSLEEPDFYKTKIKLCILLHAFRIRAVTIDRVMSYLNASGSGATNFSLLKQAGDVEENPGPDWTWRILFLVAAATGAHSNWVNVISDLKKIEDLIQSMHIDATLYTESDVHPSCKVTAMKCFLLELQVISLESGDASIHDTVENLIILANNSLSSNGNVTESGCKECEELEEKNIKEFLQSFVHIVQMFINTSGSGEGRGSLLTCGDVEENPGPKKSGVLFLLGIILLVLIGVQGTPVVRKGRCSCISTNQGTIHLQSLKDLKQFAPSPSCEKIEIIATLKNGVQTCLNPDSADVKELIKKWEKQVSQKKKQKNGKKHQKKKVLKVRKSQRSRQKKTTGSGQCTNYALLKLAGDVESNPGPAQSLALSLLILVLAFGIPRTQGSDGGAQDCCLKYSQRKIPAKVVRSYRKQEPSLGCSIPAILFLPRKRSQAELCADPKELWVQQLMQHLDKTPSPQKPAQGCRKDRGASKTGKKGKGSKGCKRTERSQTPKGPGSGVKQTLNFDLLKLAGDVESNPGPALTFALLVALLVLSCKSSCSVGCDLPQTHSLGSRRTLMLLAQMRRISLFSCLKDRHDFGFPQEEFGNQFQKAETIPVLHEMIQQIFNLFSTKDSSAAWDETLLDKFYTELYQQLNDLEACVIQGVGVTETPLMKEDSILAVRKYFQRITLYLKEKKYSPCAWEVVRAEIMRSFSLSTNLQESLRSKE

SEQ ID NO: 42 - protein, 1175 aa, Artificial Sequence
  Protein sequence encoded by NG-721 transgene cassette
MCHQQLVISWFSLVFLASPLVAIWELKKDVYVVELDWYPDAPGEMVVLTCDTPEEDGITWTLDQSSEVLGSGKTLTIQVKEFGDAGQYTCHKGGEVLSHSLLLLHKKEDGIWSTDILKDQKEPKNKTFLRCEAKNYSGRFTCWWLTTISTDLTFSVKSSRGSSDPQGVTCGAATLSAERVRGDNKEYEYSVECQEDSACPAAEESLPIEVMVDAVHKLKYENYTSSFFIRDIIKPDPPKNLQLKPLKNSRQVEVSWEYPDTWSTPHSYFSLTFCVQVQGKSKREKKDRVFTDKTSATVICRKNASISVRAQDRYYSSSWSEWASVPCSGGGGSGGGGSGGGGSRNLPVATPDPGMFPCLHHSQNLLRAVSNMLQKARQTLEFYPCTSEEIDHEDITKDKTSTVEACLPLELTKNESCLNSRETSFITNGSCLASRKTSFMMALCLSSIYEDLKMYQVEFKTMNAKLLMDPKRQIFLDQNMLAVIDELMQALNFNSETVPQKSSLEEPDFYKTKIKLCILLHAFRIRAVTIDRVMSYLNASGSGATNFSLLKQAGDVEENPGPDWTWRILFLVAAATGAHSNWVNVISDLKKIEDLIQSMHIDATLYTESDVHPSCKVTAMKCFLLELQVISLESGDASIHDTVENLIILANNSLSSNGNVTESGCKECEELEEKNIKEFLQSFVHIVQMFINTSGSGEGRGSLLTCGDVEENPGPKKSGVLFLLGIILLVLIGVQGTPVVRKGRCSCISTNQGTIHLQSLKDLKQFAPSPSCEKIEIIATLKNGVQTCLNPDSADVKELIKKWEKQVSQKKKQKNGKKHQKKKVLKVRKSQRSRQKKTTGSGQCTNYALLKLAGDVESNPGPAQSLALSLLILVLAFGIPRTQGSDGGAQDCCLKYSQRKIPAKVVRSYRKQEPSLGCSIPAILFLPRKRSQAELCADPKELWVQQLMQHLDKTPSPQKPAQGGSGVKQTLNFDLLKLAGDVESNPGPALTFALLVALLVLSCKSSCSVGCDLPQTHSLGSRRTLMLLAQMRRISLFSCLKDRHDFGFPQEEFGNQFQKAETIPVLHEMIQQIFNLFSTKDSSAAWDETLLDKFYTELYQQLNDLEACVIQGVGVTETPLMKEDSILAVRKYFQRITLYLKEKKYSPCAWEVVRAEIMRSFSLSTNLQESLRSKE

SEQ ID NO: 43 - protein, 1207 aa, Artificial Sequence
  Protein sequence encoded by NG-722 transgene cassette
MCHQQLVISWFSLVFLASPLVAIWELKKDVYVVELDWYPDAPGEMVVLTCDTPEEDGITWTLDQSSEVLGSGKTLTIQVKEFGDAGQYTCHKGGEVLSHSLLLLHKKEDGIWSTDILKDQKEPKNKTFLRCEAKNYSGRFTCWWLTTISTDLTFSVKSSRGSSDPQGVTCGAATLSAERVRGDNKEYEYSVECQEDSACPAAEESLPIEVMVDAVHKLKYENYTSSFFIRDIIKPDPPKNLQLKPLKNSRQVEVSWEYPDTWSTPHSYFSLTFCVQVQGKSKREKKDRVFTDKTSATVICRKNASISVRAQDRYYSSSWSEWASVPCSGGGGSGGGGSGGGGSRNLPVATPDPGMFPCLHHSQNLLRAVSNMLQKARQTLEFYPCTSEEIDHEDITKDKTSTVEACLPLELTKNESCLNSRETSFITNGSCLASRKTSFMMALCLSSIYEDLKMYQVEFKTMNAKLLMDPKRQIFLDQNMLAVIDELMQALNFNSETVPQKSSLEEPDFYKTKIKLCILLHAFRIRAVTIDRVMSYLNASGSGATNFSLLKQAGDVEENPGPKKSGVLFLLGIILLVLIGVQGTPVVRKGRCSCISTNQGTIHLQSLKDLKQFAPSPSCEKIEIIATLKNGVQTCLNPDSADVKELIKKWEKQVSQKKKQKNGKKHQKKKVLKVRKSQRSRQKKTTGSGQCTNYALLKLAGDVESNPGPDWTWRILFLVAAATGAHSNWVNVISDLKKIEDLIQSMHIDATLYTESDVHPSCKVTAMKCFLLELQVISLESGDASIHDTVENLIILANNSLSSNGNVTESGCKECEELEEKNIKEFLQSFVHIVQMFINTSGSGEGRGSLLTCGDVEENPGPAQSLALSLLILVLAFGIPRTQGSDGGAQDCCLKYSQRKIPAKVVRSYRKQEPSLGCSIPAILFLPRKRSQAELCADPKELWVQQLMQHLDKTPSPQKPAQGCRKDRGASKTGKKGKGSKGCKRTERSQTPKGPGSGVKQTLNFDLLKLAGDVESNPGPALTFALLVALLVLSCKSSCSVGCDLPQTHSLGSRRTLMLLAQMRRISLFSCLKDRHDFGFPQEEFGNQFQKAETIPVLHEMIQQIFNLFSTKDSSAAWDETLLDKFYTELYQQLNDLEACVIQGVGVTETPLMKEDSILAVRKYFQRITLYLKEKKYSPCAWEVVRAEIMRSFSLSTNLQESLRSKE

SEQ ID NO: 44 - protein, 1207 aa, Artificial Sequence
  Protein sequence encoded by NG-723 transgene cassette
MCHQQLVISWFSLVFLASPLVAIWELKKDVYVVELDWYPDAPGEMVVLTCDTPEEDGITWTLDQSSEVLGSGKTLTIQVKEFGDAGQYTCHKGGEVLSHSLLLLHKKEDGIWSTDILKDQKEPKNKTFLRCEAKNYSGRFTCWWLTTISTDLTFSVKSSRGSSDPQGVTCGAATLSAERVRGDNKEYEYSVECQEDSACPAAEESLPIEVMVDAVHKLKYENYTSSFFIRDIIKPDPPKNLQLKPLKNSRQVEVSWEYPDTWSTPHSYFSLTFCVQVQGKSKREKKDRVFTDKTSATVICRKNASISVRAQDRYYSSSWSEWASVPCSGGGGSGGGGSGGGGSRNLPVATPDPGMFPCLHHSQNLLRAVSNMLQKARQTLEFYPCTSEEIDHEDITKDKTSTVEACLPLELTKNESCLNSRETSFITNGSCLASRKTSFMMALCLSSIYEDLKMYQVEFKTMNAKLLMDPKRQIFLDQNMLAVIDELMQALNFNSETVPQKSSLEEPDFYKTKIKLCILLHAFRIRAVTIDRVMSYLNASGSGATNFSLLKQAGDVEENPGPKKSGVLFLLGIILLVLIGVQGTPVVRKGRCSCISTNQGTIHLQSLKDLKQFAPSPSCEKIEIIATLKNGVQTCLNPDSADVKELIKKWEKQVSQKKKQKNGKKHQKKKVLKVRKSQRSRQKKTTGSGQCTNYALLKLAGDVESNPGPDWTWRILFLVAAATGAHSNWVNVISDLKKIEDLIQSMHIDATLYTESDVHPSCKVTAMKCFLLELQVISLESGDASIHDTVENLIILANNSLSSNGNVTESGCKECEELEEKNIKEFLQSFVHIVQMFINTSGSGEGRGSLLTCGDVEENPGPALTFALLVALLVLSCKSSCSVGCDLPQTHSLGSRRTLMLLAQMRRISLFSCLKDRHDFGFPQEEFGNQFQKAETIPVLHEMIQQIFNLFSTKDSSAAWDETLLDKFYTELYQQLNDLEACVIQGVGVTETPLMKEDSILAVRKYFQRITLYLKEKKYSPCAWEVVRAEIMRSFSLSTNLQESLRSKEGSGVKQTLNFDLLKLAGDVESNPGPAQSLALSLLILVLAFGIPRTQGSDGGAQDCCLKYSQRKIPAKVVRSYRKQEPSLGCSIPAILFLPRKRSQAELCADPKELWVQQLMQHLDKTPSPQKPAQGCRKDRGASKTGKKGKGSKGCKRTERSQTPKGP

SEQ ID NO: 45 - protein, 1175 aa, Artificial Sequence
  Protein sequence encoded by NG-724 transgene cassette
MCHQQLVISWFSLVFLASPLVAIWELKKDVYVVELDWYPDAPGEMVVLTCDTPEEDGITWTLDQSSEVLGSGKTLTIQVKEFGDAGQYTCHKGGEVLSHSLLLLHKKEDGIWSTDILKDQKEPKNKTFLRCEAKNYSGRFTCWWLTTISTDLTFSVKSSRGSSDPQGVTCGAATLSAERVRGDNKEYEYSVECQEDSACPAAEESLPIEVMVDAVHKLKYENYTSSFFIRDIIKPDPPKNLQLKPLKNSRQVEVSWEYPDTWSTPHSYFSLTFCVQVQGKSKREKKDRVFTDKTSATVICRKNASISVRAQDRYYSSSWSEWASVPCSGGGGSGGGGSGGGGSRNLPVATPDPGMFPCLHHSQNLLRAVSNMLQKARQTLEFYPCTSEEIDHEDITKDKTSTVEACLPLELTKNESCLNSRETSFITNGSCLASRKTSFMMALCLSSIYEDLKMYQVEFKTMNAKLLMDPKRQIFLDQNMLAVIDELMQALNFNSETVPQKSSLEEPDFYKTKIKLCILLHAFRIRAVTIDRVMSYLNASGSGATNFSLLKQAGDVEENPGPKKSGVLFLLGIILLVLIGVQGTPVVRKGRCSCISTNQGTIHLQSLKDLKQFAPSPSCEKIEIIATLKNGVQTCLNPDSADVKELIKKWEKQVSQKKKQKNGKKHQKKKVLKVRKSQRSRQKKTTGSGQCTNYALLKLAGDVESNPGPDWTWRILFLVAAATGAHSNWVNVISDLKKIEDLIQSMHIDATLYTESDVHPSCKVTAMKCFLLELQVISLESGDASIHDTVENLIILANNSLSSNGNVTESGCKECEELEEKNIKEFLQSFVHIVQMFINTSGSGEGRGSLLTCGDVEENPGPALTFALLVALLVLSCKSSCSVGCDLPQTHSLGSRRTLMLLAQMRRISLFSCLKDRHDFGFPQEEFGNQFQKAETIPVLHEMIQQIFNLFSTKDSSAAWDETLLDKFYTELYQQLNDLEACVIQGVGVTETPLMKEDSILAVRKYFQRITLYLKEKKYSPCAWEVVRAEIMRSFSLSTNLQESLRSKEGSGVKQTLNFDLLKLAGDVESNPGPAQSLALSLLILVLAFGIPRTQGSDGGAQDCCLKYSQRKIPAKVVRSYRKQEPSLGCSIPAILFLPRKRSQAELCADPKELWVQQLMQHLDKTPSPQKPAQG

SEQ ID NO: 46 - protein, 1207 aa, Artificial Sequence
  Protein sequence encoded by NG-725 transgene cassette
MCHQQLVISWFSLVFLASPLVAIWELKKDVYVVELDWYPDAPGEMVVLTCDTPEEDGITWTLDQSSEVLGSGKTLTIQVKEFGDAGQYTCHKGGEVLSHSLLLLHKKEDGIWSTDILKDQKEPKNKTFLRCEAKNYSGRFTCWWLTTISTDLTFSVKSSRGSSDPQGVTCGAATLSAERVRGDNKEYEYSVECQEDSACPAAEESLPIEVMVDAVHKLKYENYTSSFFIRDIIKPDPPKNLQLKPLKNSRQVEVSWEYPDTWSTPHSYFSLTFCVQVQGKSKREKKDRVFTDKTSATVICRKNASISVRAQDRYYSSSWSEWASVPCSGGGGSGGGGSGGGGSRNLPVATPDPGMFPCLHHSQNLLRAVSNMLQKARQTLEFYPCTSEEIDHEDITKDKTSTVEACLPLELTKNESCLNSRETSFITNGSCLASRKTSFMMALCLSSIYEDLKMYQVEFKTMNAKLLMDPKRQIFLDQNMLAVIDELMQALNFNSETVPQKSSLEEPDFYKTKIKLCILLHAFRIRAVTIDRVMSYLNASGSGATNFSLLKQAGDVEENPGPDWTWRILFLVAAATGAHSNWVNVISDLKKIEDLIQSMHIDATLYTESDVHPSCKVTAMKCFLLELQVISLESGDASIHDTVENLIILANNSLSSNGNVTESGCKECEELEEKNIKEFLQSFVHIVQMFINTSGSGQCTNYALLKLAGDVESNPGPAQSLALSLLILVLAFGIPRTQGSDGGAQDCCLKYSQRKIPAKVVRSYRKQEPSLGCSIPAILFLPRKRSQAELCADPKELWVQQLMQHLDKTPSPQKPAQGCRKDRGASKTGKKGKGSKGCKRTERSQTPKGPGSGVKQTLNFDLLKLAGDVESNPGPKKSGVLFLLGIILLVLIGVQGTPVVRKGRCSCISTNQGTIHLQSLKDLKQFAPSPSCEKIEIIATLKNGVQTCLNPDSADVKELIKKWEKQVSQKKKQKNGKKHQKKKVLKVRKSQRSRQKKTTGSGEGRGSLLTCGDVEENPGPALTFALLVALLVLSCKSSCSVGCDLPQTHSLGSRRTLMLLAQMRRISLFSCLKDRHDFGFPQEEFGNQFQKAETIPVLHEMIQQIFNLFSTKDSSAAWDETLLDKFYTELYQQLNDLEACVIQGVGVTETPLMKEDSILAVRKYFQRITLYLKEKKYSPCAWEVVRAEIMRSFSLSTNLQESLRSKE

SEQ ID NO: 47 - protein, 1207 aa, Artificial Sequence
  Protein sequence encoded by NG-726 transgene cassette
MAQSLALSLLILVLAFGIPRTQGSDGGAQDCCLKYSQRKIPAKVVRSYRKQEPSLGCSIPAILFLPRKRSQAELCADPKELWVQQLMQHLDKTPSPQKPAQGCRKDRGASKTGKKGKGSKGCKRTERSQTPKGPGSGQCTNYALLKLAGDVESNPGPDWTWRILFLVAAATGAHSNWVNVISDLKKIEDLIQSMHIDATLYTESDVHPSCKVTAMKCFLLELQVISLESGDASIHDTVENLIILANNSLSSNGNVTESGCKECEELEEKNIKEFLQSFVHIVQMFINTSGSGVKQTLNFDLLKLAGDVESNPGPCHQQLVISWFSLVFLASPLVAIWELKKDVYVVELDWYPDAPGEMVVLTCDTPEEDGITWTLDQSSEVLGSGKTLTIQVKEFGDAGQYTCHKGGEVLSHSLLLLHKKEDGIWSTDILKDQKEPKNKTFLRCEAKNYSGRFTCWWLTTISTDLTFSVKSSRGSSDPQGVTCGAATLSAERVRGDNKEYEYSVECQEDSACPAAEESLPIEVMVDAVHKLKYENYTSSFFIRDIIKPDPPKNLQLKPLKNSRQVEVSWEYPDTWSTPHSYFSLTFCVQVQGKSKREKKDRVFTDKTSATVICRKNASISVRAQDRYYSSSWSEWASVPCSGGGGSGGGGSGGGGSRNLPVATPDPGMFPCLHHSQNLLRAVSNMLQKARQTLEFYPCTSEEIDHEDITKDKTSTVEACLPLELTKNESCLNSRETSFITNGSCLASRKTSFMMALCLSSIYEDLKMYQVEFKTMNAKLLMDPKRQIFLDQNMLAVIDELMQALNFNSETVPQKSSLEEPDFYKTKIKLCILLHAFRIRAVTIDRVMSYLNASGSGEGRGSLLTCGDVEENPGPKKSGVLFLLGIILLVLIGVQGTPVVRKGRCSCISTNQGTIHLQSLKDLKQFAPSPSCEKIEIIATLKNGVQTCLNPDSADVKELIKKWEKQVSQKKKQKNGKKHQKKKVLKVRKSQRSRQKKTTGSGATNFSLLKQAGDVEENPGPALTFALLVALLVLSCKSSCSVGCDLPQTHSLGSRRTLMLLAQMRRISLFSCLKDRHDFGFPQEEFGNQFQKAETIPVLHEMIQQIFNLFSTKDSSAAWDETLLDKFYTELYQQLNDLEACVIQGVGVTETPLMKEDSILAVRKYFQRITLYLKEKKYSPCAWEVVRAEIMRSFSLSTNLQESLRSKE

SEQ ID NO: 48 - protein, 309 aa, Artificial Sequence
  Protein sequence encoded by NG-740 transgene cassette
MAPRRARGCRTLGLPALLLLLLLRPPATRGITCPPPMSVEHADIWVKSYSLYSRERYICNSGFKRKAGTSSLTECVLNKATNVAHWTTPSLKCIRDEQKLISEEDLAVGQDTQEVIVVPHSLPFKVVVISAILALVVLTIISLIILIMLWQKKPRGSGATNFSLLKQAGDVEENPGPDWTWRILFLVAAATGAHSNWVNVISDLKKIEDLIQSMHIDATLYTESDVHPSCKVTAMKCFLLELQVISLESGDASIHDTVENLIILANNSLSSNGNVTESGCKECEELEEKNIKEFLQSFVHIVQMFINTS

SEQ ID NO: 49 - protein, 304 aa, Artificial Sequence
  Protein sequence encoded by NG-742 transgene cassette
MAPRRARGCRTLGLPALLLLLLLRPPATRGITCPPPMSVEHADIWVKSYSLYSRERYICNSGFKRKAGTSSLTECVLNKATNVAHWTTPSLKCIRDGGGGSAVGQDTQEVIVVPHSLPFKVVVISAILALVVLTIISLIILIMLWQKKPRGSGATNFSLLKQAGDVEENPGPDWTWRILFLVAAATGAHSNWVNVISDLKKIEDLIQSMHIDATLYTESDVHPSCKVTAMKCFLLELQVISLESGDASIHDTVENLIILANNSLSSNGNVTESGCKECEELEEKNIKEFLQSFVHIVQMFINTS

SEQ ID NO: 50 - protein, 150 aa, Artificial Sequence; identical to SEQ ID NO: 29
  Protein sequence encoded by NG-744 transgene cassette

SEQ ID NO: 51 - protein, 155 aa, Artificial Sequence; identical to SEQ ID NO: 25
  Protein sequence encoded by NG-746 transgene cassette

SEQ ID NO: 52 - protein, 1208 aa, Artificial Sequence
  Protein sequence encoded by NG-750 transgene cassette
MAQSLALSLLILVLAFGIPRTQGSDGGAQDCCLKYSQRKIPAKVVRSYRKQEPSLGCSIPAILFLPRKRSQAELCADPKELWVQQLMQHLDKTPSPQKPAQGCRKDRGASKTGKKGKGSKGCKRTERSQTPKGPGSGATNFSLLKQAGDVEENPGPDWTWRILFLVAAATGAHSNWVNVISDLKKIEDLIQSMHIDATLYTESDVHPSCKVTAMKCFLLELQVISLESGDASIHDTVENLIILANNSLSSNGNVTESGCKECEELEEKNIKEFLQSFVHIVQMFINTSGSGEGRGSLLTCGDVEENPGPALTFALLVALLVLSCKSSCSVGCDLPQTHSLGSRRTLMLLAQMRRISLFSCLKDRHDFGFPQEEFGNQFQKAETIPVLHEMIQQIFNLFSTKDSSAAWDETLLDKFYTELYQQLNDLEACVIQGVGVTETPLMKEDSILAVRKYFQRITLYLKEKKYSPCAWEVVRAEIMRSFSLSTNLQESLRSKEGSGQCTNYALLKLAGDVESNPGPKKSGVLFLLGIILLVLIGVQGTPVVRKGRCSCISTNQGTIHLQSLKDLKQFAPSPSCEKIEIIATLKNGVQTCLNPDSADVKELIKKWEKQVSQKKKQKNGKKHQKKKVLKVRKSQRSRQKKTTGSGVKQTLNFDLLKLAGDVESNPGPMCHQQLVISWFSLVFLASPLVAIWELKKDVYVVELDWYPDAPGEMVVLTCDTPEEDGITWTLDQSSEVLGSGKTLTIQVKEFGDAGQYTCHKGGEVLSHSLLLLHKKEDGIWSTDILKDQKEPKNKTFLRCEAKNYSGRFTCWWLTTISTDLTFSVKSSRGSSDPQGVTCGAATLSAERVRGDNKEYEYSVECQEDSACPAAEESLPIEVMVDAVHKLKYENYTSSFFIRDIIKPDPPKNLQLKPLKNSRQVEVSWEYPDTWSTPHSYFSLTFCVQVQGKSKREKKDRVFTDKTSATVICRKNASISVRAQDRYYSSSWSEWASVPCSGGGGSGGGGSGGGGSRNLPVATPDPGMFPCLHHSQNLLRAVSNMLQKARQTLEFYPCTSEEIDHEDITKDKTSTVEACLPLELTKNESCLNSRETSFITNGSCLASRKTSFMMALCLSSIYEDLKMYQVEFKTMNAKLLMDPKRQIFLDQNMLAVIDELMQALNFNSETVPQKSSLEEPDFYKTKIKLCILLHAFRIRAVTIDRVMSYLNAS

SEQ ID NO: 53 - protein, 1208 aa, Artificial Sequence
  Protein sequence encoded by NG-751 transgene cassette
MDWTWRILFLVAAATGAHSNWVNVISDLKKIEDLIQSMHIDATLYTESDVHPSCKVTAMKCFLLELQVISLESGDASIHDTVENLIILANNSLSSNGNVTESGCKECEELEEKNIKEFLQSFVHIVQMFINTSGSGATNFSLLKQAGDVEENPGPAQSLALSLLILVLAFGIPRTQGSDGGAQDCCLKYSQRKIPAKVVRSYRKQEPSLGCSIPAILFLPRKRSQAELCADPKELWVQQLMQHLDKTPSPQKPAQGCRKDRGASKTGKKGKGSKGCKRTERSQTPKGPGSGEGRGSLLTCGDVEENPGPALTFALLVALLVLSCKSSCSVGCDLPQTHSLGSRRTLMLLAQMRRISLFSCLKDRHDFGFPQEEFGNQFQKAETIPVLHEMIQQIFNLFSTKDSSAAWDETLLDKFYTELYQQLNDLEACVIQGVGVTETPLMKEDSILAVRKYFQRITLYLKEKKYSPCAWEVVRAEIMRSFSLSTNLQESLRSKEGSGQCTNYALLKLAGDVESNPGPKKSGVLFLLGIILLVLIGVQGTPVVRKGRCSCISTNQGTIHLQSLKDLKQFAPSPSCEKIEIIATLKNGVQTCLNPDSADVKELIKKWEKQVSQKKKQKNGKKHQKKKVLKVRKSQRSRQKKTTGSGVKQTLNFDLLKLAGDVESNPGPMCHQQLVISWFSLVFLASPLVAIWELKKDVYVVELDWYPDAPGEMVVLTCDTPEEDGITWTLDQSSEVLGSGKTLTIQVKEFGDAGQYTCHKGGEVLSHSLLLLHKKEDGIWSTDILKDQKEPKNKTFLRCEAKNYSGRFTCWWLTTISTDLTFSVKSSRGSSDPQGVTCGAATLSAERVRGDNKEYEYSVECQEDSACPAAEESLPIEVMVDAVHKLKYENYTSSFFIRDIIKPDPPKNLQLKPLKNSRQVEVSWEYPDTWSTPHSYFSLTFCVQVQGKSKREKKDRVFTDKTSATVICRKNASISVRAQDRYYSSSWSEWASVPCSGGGGSGGGGSGGGGSRNLPVATPDPGMFPCLHHSQNLLRAVSNMLQKARQTLEFYPCTSEEIDHEDITKDKTSTVEACLPLELTKNESCLNSRETSFITNGSCLASRKTSFMMALCLSSIYEDLKMYQVEFKTMNAKLLMDPKRQIFLDQNMLAVIDELMQALNFNSETVPQKSSLEEPDFYKTKIKLCILLHAFRIRAVTIDRVMSYLNAS

SEQ ID NO: 54 - protein, 1208 aa, Artificial Sequence
  Protein sequence encoded by NG-752 transgene cassette
MAQSLALSLLILVLAFGIPRTQGSDGGAQDCCLKYSQRKIPAKVVRSYRKQEPSLGCSIPAILFLPRKRSQAELCADPKELWVQQLMQHLDKTPSPQKPAQGCRKDRGASKTGKKGKGSKGCKRTERSQTPKGPGSGEGRGSLLTCGDVEENPGPDWTWRILFLVAAATGAHSNWVNVISDLKKIEDLIQSMHIDATLYTESDVHPSCKVTAMKCFLLELQVISLESGDASIHDTVENLIILANNSLSSNGNVTESGCKECEELEEKNIKEFLQSFVHIVQMFINTSGSGATNFSLLKQAGDVEENPGPALTFALLVALLVLSCKSSCSVGCDLPQTHSLGSRRTLMLLAQMRRISLFSCLKDRHDFGFPQEEFGNQFQKAETIPVLHEMIQQIFNLFSTKDSSAAWDETLLDKFYTELYQQLNDLEACVIQGVGVTETPLMKEDSILAVRKYFQRITLYLKEKKYSPCAWEVVRAEIMRSFSLSTNLQESLRSKEGSGQCTNYALLKLAGDVESNPGPKKSGVLFLLGIILLVLIGVQGTPVVRKGRCSCISTNQGTIHLQSLKDLKQFAPSPSCEKIEIIATLKNGVQTCLNPDSADVKELIKKWEKQVSQKKKQKNGKKHQKKKVLKVRKSQRSRQKKTTGSGVKQTLNFDLLKLAGDVESNPGPMCHQQLVISWFSLVFLASPLVAIWELKKDVYVVELDWYPDAPGEMVVLTCDTPEEDGITWTLDQSSEVLGSGKTLTIQVKEFGDAGQYTCHKGGEVLSHSLLLLHKKEDGIWSTDILKDQKEPKNKTFLRCEAKNYSGRFTCWWLTTISTDLTFSVKSSRGSSDPQGVTCGAATLSAERVRGDNKEYEYSVECQEDSACPAAEESLPIEVMVDAVHKLKYENYTSSFFIRDIIKPDPPKNLQLKPLKNSRQVEVSWEYPDTWSTPHSYFSLTFCVQVQGKSKREKKDRVFTDKTSATVICRKNASISVRAQDRYYSSSWSEWASVPCSGGGGSGGGGSGGGGSRNLPVATPDPGMFPCLHHSQNLLRAVSNMLQKARQTLEFYPCTSEEIDHEDITKDKTSTVEACLPLELTKNESCLNSRETSFITNGSCLASRKTSFMMALCLSSIYEDLKMYQVEFKTMNAKLLMDPKRQIFLDQNMLAVIDELMQALNFNSETVPQKSSLEEPDFYKTKIKLCILLHAFRIRAVTIDRVMSYLNAS

SEQ ID NO: 55 - protein, 1208 aa, Artificial Sequence
  Protein sequence encoded by NG-753 transgene cassette
MDWTWRILFLVAAATGAHSNWVNVISDLKKIEDLIQSMHIDATLYTESDVHPSCKVTAMKCFLLELQVISLESGDASIHDTVENLIILANNSLSSNGNVTESGCKECEELEEKNIKEFLQSFVHIVQMFINTSGSGEGRGSLLTCGDVEENPGPAQSLALSLLILVLAFGIPRTQGSDGGAQDCCLKYSQRKIPAKVVRSYRKQEPSLGCSIPAILFLPRKRSQAELCADPKELWVQQLMQHLDKTPSPQKPAQGCRKDRGASKTGKKGKGSKGCKRTERSQTPKGPGSGATNFSLLKQAGDVEENPGPALTFALLVALLVLSCKSSCSVGCDLPQTHSLGSRRTLMLLAQMRRISLFSCLKDRHDFGFPQEEFGNQFQKAETIPVLHEMIQQIFNLFSTKDSSAAWDETLLDKFYTELYQQLNDLEACVIQGVGVTETPLMKEDSILAVRKYFQRITLYLKEKKYSPCAWEVVRAEIMRSFSLSTNLQESLRSKEGSGQCTNYALLKLAGDVESNPGPKKSGVLFLLGIILLVLIGVQGTPVVRKGRCSCISTNQGTIHLQSLKDLKQFAPSPSCEKIEIIATLKNGVQTCLNPDSADVKELIKKWEKQVSQKKKQKNGKKHQKKKVLKVRKSQRSRQKKTTGSGVKQTLNFDLLKLAGDVESNPGPMCHQQLVISWFSLVFLASPLVAIWELKKDVYVVELDWYPDAPGEMVVLTCDTPEEDGITWTLDQSSEVLGSGKTLTIQVKEFGDAGQYTCHKGGEVLSHSLLLLHKKEDGIWSTDILKDQKEPKNKTFLRCEAKNYSGRFTCWWLTTISTDLTFSVKSSRGSSDPQGVTCGAATLSAERVRGDNKEYEYSVECQEDSACPAAEESLPIEVMVDAVHKLKYENYTSSFFIRDIIKPDPPKNLQLKPLKNSRQVEVSWEYPDTWSTPHSYFSLTFCVQVQGKSKREKKDRVFTDKTSATVICRKNASISVRAQDRYYSSSWSEWASVPCSGGGGSGGGGSGGGGSRNLPVATPDPGMFPCLHHSQNLLRAVSNMLQKARQTLEFYPCTSEEIDHEDITKDKTSTVEACLPLELTKNESCLNSRETSFITNGSCLASRKTSFMMALCLSSIYEDLKMYQVEFKTMNAKLLMDPKRQIFLDQNMLAVIDELMQALNFNSETVPQKSSLEEPDFYKTKIKLCILLHAFRIRAVTIDRVMSYLNAS

SEQ ID NO: 56 - protein, 1208 aa, Artificial Sequence
  Protein sequence encoded by NG-754 transgene cassette
MKKSGVLFLLGIILLVLIGVQGTPVVRKGRCSCISTNQGTIHLQSLKDLKQFAPSPSCEKIEIIATLKNGVQTCLNPDSADVKELIKKWEKQVSQKKKQKNGKKHQKKKVLKVRKSQRSRQKKTTGSGEGRGSLLTCGDVEENPGPAQSLALSLLILVLAFGIPRTQGSDGGAQDCCLKYSQRKIPAKVVRSYRKQEPSLGCSIPAILFLPRKRSQAELCADPKELWVQQLMQHLDKTPSPQKPAQGCRKDRGASKTGKKGKGSKGCKRTERSQTPKGPGSGATNFSLLKQAGDVEENPGPALTFALLVALLVLSCKSSCSVGCDLPQTHSLGSRRTLMLLAQMRRISLFSCLKDRHDFGFPQEEFGNQFQKAETIPVLHEMIQQIFNLFSTKDSSAAWDETLLDKFYTELYQQLNDLEACVIQGVGVTETPLMKEDSILAVRKYFQRITLYLKEKKYSPCAWEVVRAEIMRSFSLSTNLQESLRSKEGSGQCTNYALLKLAGDVESNPGPDWTWRILFLVAAATGAHSNWVNVISDLKKIEDLIQSMHIDATLYTESDVHPSCKVTAMKCFLLELQVISLESGDASIHDTVENLIILANNSLSSNGNVTESGCKECEELEEKNIKEFLQSFVHIVQMFINTSGSGVKQTLNFDLLKLAGDVESNPGPMCHQQLVISWFSLVFLASPLVAIWELKKDVYVVELDWYPDAPGEMVVLTCDTPEEDGITWTLDQSSEVLGSGKTLTIQVKEFGDAGQYTCHKGGEVLSHSLLLLHKKEDGIWSTDILKDQKEPKNKTFLRCEAKNYSGRFTCWWLTTISTDLTFSVKSSRGSSDPQGVTCGAATLSAERVRGDNKEYEYSVECQEDSACPAAEESLPIEVMVDAVHKLKYENYTSSFFIRDIIKPDPPKNLQLKPLKNSRQVEVSWEYPDTWSTPHSYFSLTFCVQVQGKSKREKKDRVFTDKTSATVICRKNASISVRAQDRYYSSSWSEWASVPCSGGGGSGGGGSGGGGSRNLPVATPDPGMFPCLHHSQNLLRAVSNMLQKARQTLEFYPCTSEEIDHEDITKDKTSTVEACLPLELTKNESCLNSRETSFITNGSCLASRKTSFMMALCLSSIYEDLKMYQVEFKTMNAKLLMDPKRQIFLDQNMLAVIDELMQALNFNSETVPQKSSLEEPDFYKTKIKLCILLHAFRIRAVTIDRVMSYLNAS

SEQ ID NO: 57 - protein, 1054 aa, Artificial Sequence
  Protein sequence encoded by NG-755 transgene cassette
MDWTWRILFLVAAATGAHSNWVNVISDLKKIEDLIQSMHIDATLYTESDVHPSCKVTAMKCFLLELQVISLESGDASIHDTVENLIILANNSLSSNGNVTESGCKECEELEEKNIKEFLQSFVHIVQMFINTSGSGATNFSLLKQAGDVEENPGPALTFALLVALLVLSCKSSCSVGCDLPQTHSLGSRRTLMLLAQMRRISLFSCLKDRHDFGFPQEEFGNQFQKAETIPVLHEMIQQIFNLFSTKDSSAAWDETLLDKFYTELYQQLNDLEACVIQGVGVTETPLMKEDSILAVRKYFQRITLYLKEKKYSPCAWEVVRAEIMRSFSLSTNLQESLRSKEGSGQCTNYALLKLAGDVESNPGPKKSGVLFLLGIILLVLIGVQGTPVVRKGRCSCISTNQGTIHLQSLKDLKQFAPSPSCEKIEIIATLKNGVQTCLNPDSADVKELIKKWEKQVSQKKKQKNGKKHQKKKVLKVRKSQRSRQKKTTGSGVKQTLNFDLLKLAGDVESNPGPMCHQQLVISWFSLVFLASPLVAIWELKKDVYVVELDWYPDAPGEMVVLTCDTPEEDGITWTLDQSSEVLGSGKTLTIQVKEFGDAGQYTCHKGGEVLSHSLLLLHKKEDGIWSTDILKDQKEPKNKTFLRCEAKNYSGRFTCWWLTTISTDLTFSVKSSRGSSDPQGVTCGAATLSAERVRGDNKEYEYSVECQEDSACPAAEESLPIEVMVDAVHKLKYENYTSSFFIRDIIKPDPPKNLQLKPLKNSRQVEVSWEYPDTWSTPHSYFSLTFCVQVQGKSKREKKDRVFTDKTSATVICRKNASISVRAQDRYYSSSWSEWASVPCSGGGGSGGGGSGGGGSRNLPVATPDPGMFPCLHHSQNLLRAVSNMLQKARQTLEFYPCTSEEIDHEDITKDKTSTVEACLPLELTKNESCLNSRETSFITNGSCLASRKTSFMMALCLSSIYEDLKMYQVEFKTMNAKLLMDPKRQIFLDQNMLAVIDELMQALNFNSETVPQKSSLEEPDFYKTKIKLCILLHAFRIRAVTIDRVMSYLNAS

SEQ ID NO: 58 - protein, 1053 aa, Artificial Sequence
  Protein sequence encoded by NG-756 transgene cassette
MDWTWRILFLVAAATGAHSNWVNVISDLKKIEDLIQSMHIDATLYTESDVHPSCKVTAMKCFLLELQVISLESGDASIHDTVENLIILANNSLSSNGNVTESGCKECEELEEKNIKEFLQSFVHIVQMFINTSGSGEGRGSLLTCGDVEENPGPALTFALLVALLVLSCKSSCSVGCDLPQTHSLGSRRTLMLLAQMRRISLFSCLKDRHDFGFPQEEFGNQFQKAETIPVLHEMIQQIFNLFSTKDSSAAWDETLLDKFYTELYQQLNDLEACVIQGVGVTETPLMKEDSILAVRKYFQRITLYLKEKKYSPCAWEVVRAEIMRSFSLSTNLQESLRSKEGSGQCTNYALLKLAGDVESNPGPKKSGVLFLLGIILLVLIGVQGTPVVRKGRCSCISTNQGTIHLQSLKDLKQFAPSPSCEKIEIIATLKNGVQTCLNPDSADVKELIKKWEKQVSQKKKQKNGKKHQKKKVLKVRKSQRSRQKKTTGSGVKQTLNFDLLKLAGDVESNPGPMCHQQLVISWFSLVFLASPLVAIWELKKDVYVVELDWYPDAPGEMVVLTCDTPEEDGITWTLDQSSEVLGSGKTLTIQVKEFGDAGQYTCHKGGEVLSHSLLLLHKKEDGIWSTDILKDQKEPKNKTFLRCEAKNYSGRFTCWWLTTISTDLTFSVKSSRGSSDPQGVTCGAATLSAERVRGDNKEYEYSVECQEDSACPAAEESLPIEVMVDAVHKLKYENYTSSFFIRDIIKPDPPKNLQLKPLKNSRQVEVSWEYPDTWSTPHSYFSLTFCVQVQGKSKREKKDRVFTDKTSATVICRKNASISVRAQDRYYSSSWSEWASVPCSGGGGSGGGGSGGGGSRNLPVATPDPGMFPCLHHSQNLLRAVSNMLQKARQTLEFYPCTSEEIDHEDITKDKTSTVEACLPLELTKNESCLNSRETSFITNGSCLASRKTSFMMALCLSSIYEDLKMYQVEFKTMNAKLLMDPKRQIFLDQNMLAVIDELMQALNFNSETVPQKSSLEEPDFYKTKIKLCILLHAFRIRAVTIDRVMSYLNAS

SEQ ID NO: 59 - protein, 1053 aa, Artificial Sequence
  Protein sequence encoded by NG-757 transgene cassette
MKKSGVLFLLGIILLVLIGVQGTPVVRKGRCSCISTNQGTIHLQSLKDLKQFAPSPSCEKIEIIATLKNGVQTCLNPDSADVKELIKKWEKQVSQKKKQKNGKKHQKKKVLKVRKSQRSRQKKTTGSGVKQTLNFDLLKLAGDVESNPGPALTFALLVALLVLSCKSSCSVGCDLPQTHSLGSRRTLMLLAQMRRISLFSCLKDRHDFGFPQEEFGNQFQKAETIPVLHEMIQQIFNLFSTKDSSAAWDETLLDKFYTELYQQLNDLEACVIQGVGVTETPLMKEDSILAVRKYFQRITLYLKEKKYSPCAWEVVRAEIMRSFSLSTNLQESLRSKEGSGQCTNYALLKLAGDVESNPGPDWTWRILFLVAAATGAHSNWVNVISDLKKIEDLIQSMHIDATLYTESDVHPSCKVTAMKCFLLELQVISLESGDASIHDTVENLIILANNSLSSNGNVTESGCKECEELEEKNIKEFLQSFVHIVQMFINTSGSGEGRGSLLTCGDVEENPGPMCHQQLVISWFSLVFLASPLVAIWELKKDVYVVELDWYPDAPGEMVVLTCDTPEEDGITWTLDQSSEVLGSGKTLTIQVKEFGDAGQYTCHKGGEVLSHSLLLLHKKEDGIWSTDILKDQKEPKNKTFLRCEAKNYSGRFTCWWLTTISTDLTFSVKSSRGSSDPQGVTCGAATLSAERVRGDNKEYEYSVECQEDSACPAAEESLPIEVMVDAVHKLKYENYTSSFFIRDIIKPDPPKNLQLKPLKNSRQVEVSWEYPDTWSTPHSYFSLTFCVQVQGKSKREKKDRVFTDKTSATVICRKNASISVRAQDRYYSSSWSEWASVPCSGGGGSGGGGSGGGGSRNLPVATPDPGMFPCLHHSQNLLRAVSNMLQKARQTLEFYPCTSEEIDHEDITKDKTSTVEACLPLELTKNESCLNSRETSFITNGSCLASRKTSFMMALCLSSIYEDLKMYQVEFKTMNAKLLMDPKRQIFLDQNMLAVIDELMQALNFNSETVPQKSSLEEPDFYKTKIKLCILLHAFRIRAVTIDRVMSYLNAS

SEQ ID NO: 60 - protein, 1054 aa, Artificial Sequence
  Protein sequence encoded by NG-758 transgene cassette
MKKSGVLFLLGIILLVLIGVQGTPVVRKGRCSCISTNQGTIHLQSLKDLKQFAPSPSCEKIEIIATLKNGVQTCLNPDSADVKELIKKWEKQVSQKKKQKNGKKHQKKKVLKVRKSQRSRQKKTTGSGVKQTLNFDLLKLAGDVESNPGPALTFALLVALLVLSCKSSCSVGCDLPQTHSLGSRRTLMLLAQMRRISLFSCLKDRHDFGFPQEEFGNQFQKAETIPVLHEMIQQIFNLFSTKDSSAAWDETLLDKFYTELYQQLNDLEACVIQGVGVTETPLMKEDSILAVRKYFQRITLYLKEKKYSPCAWEVVRAEIMRSFSLSTNLQESLRSKEGSGQCTNYALLKLAGDVESNPGPDWTWRILFLVAAATGAHSNWVNVISDLKKIEDLIQSMHIDATLYTESDVHPSCKVTAMKCFLLELQVISLESGDASIHDTVENLIILANNSLSSNGNVTESGCKECEELEEKNIKEFLQSFVHIVQMFINTSGSGATNFSLLKQAGDVEENPGPMCHQQLVISWFSLVFLASPLVAIWELKKDVYVVELDWYPDAPGEMVVLTCDTPEEDGITWTLDQSSEVLGSGKTLTIQVKEFGDAGQYTCHKGGEVLSHSLLLLHKKEDGIWSTDILKDQKEPKNKTFLRCEAKNYSGRFTCWWLTTISTDLTFSVKSSRGSSDPQGVTCGAATLSAERVRGDNKEYEYSVECQEDSACPAAEESLPIEVMVDAVHKLKYENYTSSFFIRDIIKPDPPKNLQLKPLKNSRQVEVSWEYPDTWSTPHSYFSLTFCVQVQGKSKREKKDRVFTDKTSATVICRKNASISVRAQDRYYSSSWSEWASVPCSGGGGSGGGGSGGGGSRNLPVATPDPGMFPCLHHSQNLLRAVSNMLQKARQTLEFYPCTSEEIDHEDITKDKTSTVEACLPLELTKNESCLNSRETSFITNGSCLASRKTSFMMALCLSSIYEDLKMYQVEFKTMNAKLLMDPKRQIFLDQNMLAVIDELMQALNFNSETVPQKSSLEEPDFYKTKIKLCILLHAFRIRAVTIDRVMSYLNAS

SEQ ID NO: 61 - protein, 1052 aa, Artificial Sequence
  Protein sequence encoded by NG-759 transgene cassette
MCHQQLVISWFSLVFLASPLVAIWELKKDVYVVELDWYPDAPGEMVVLTCDTPEEDGITWTLDQSSEVLGSGKTLTIQVKEFGDAGQYTCHKGGEVLSHSLLLLHKKEDGIWSTDILKDQKEPKNKTFLRCEAKNYSGRFTCWWLTTISTDLTFSVKSSRGSSDPQGVTCGAATLSAERVRGDNKEYEYSVECQEDSACPAAEESLPIEVMVDAVHKLKYENYTSSFFIRDIIKPDPPKNLQLKPLKNSRQVEVSWEYPDTWSTPHSYFSLTFCVQVQGKSKREKKDRVFTDKTSATVICRKNASISVRAQDRYYSSSWSEWASVPCSGGGGSGGGGSGGGGSRNLPVATPDPGMFPCLHHSQNLLRAVSNMLQKARQTLEFYPCTSEEIDHEDITKDKTSTVEACLPLELTKNESCLNSRETSFITNGSCLASRKTSFMMALCLSSIYEDLKMYQVEFKTMNAKLLMDPKRQIFLDQNMLAVIDELMQALNFNSETVPQKSSLEEPDFYKTKIKLCILLHAFRIRAVTIDRVMSYLNASGSGEGRGSLLTCGDVEENPGPKKSGVLFLLGIILLVLIGVQGTPVVRKGRCSCISTNQGTIHLQSLKDLKQFAPSPSCEKIEIIATLKNGVQTCLNPDSADVKELIKKWEKQVSQKKKQKNGKKHQKKKVLKVRKSQRSRQKKTTGSGVKQTLNFDLLKLAGDVESNPGPALTFALLVALLVLSCKSSCSVGCDLPQTHSLGSRRTLMLLAQMRRISLFSCLKDRHDFGFPQEEFGNQFQKAETIPVLHEMIQQIFNLFSTKDSSAAWDETLLDKFYTELYQQLNDLEACVIQGVGVTETPLMKEDSILAVRKYFQRITLYLKEKKYSPCAWEVVRAEIMRSFSLSTNLQESLRSKEGSGQCTNYALLKLAGDVESNPGPDWTWRILFLVAAATGAHSNWVNVISDLKKIEDLIQSMHIDATLYTESDVHPSCKVTAMKCFLLELQVISLESGDASIHDTVENLIILANNSLSSNGNVTESGCKECEELEEKNIKEFLQSFVHIVQMFINTS

SEQ ID NO: 62 - protein, 1208 aa, Artificial Sequence
  Protein sequence encoded by NG-760 transgene cassette
MALTFALLVALLVLSCKSSCSVGCDLPQTHSLGSRRTLMLLAQMRRISLFSCLKDRHDFGFPQEEFGNQFQKAETIPVLHEMIQQIFNLFSTKDSSAAWDETLLDKFYTELYQQLNDLEACVIQGVGVTETPLMKEDSILAVRKYFQRITLYLKEKKYSPCAWEVVRAEIMRSFSLSTNLQESLRSKEGSGQCTNYALLKLAGDVESNPGPAQSLALSLLILVLAFGIPRTQGSDGGAQDCCLKYSQRKIPAKVVRSYRKQEPSLGCSIPAILFLPRKRSQAELCADPKELWVQQLMQHLDKTPSPQKPAQGCRKDRGASKTGKKGKGSKGCKRTERSQTPKGPGSGEGRGSLLTCGDVEENPGPDWTWRILFLVAAATGAHSNWVNVISDLKKIEDLIQSMHIDATLYTESDVHPSCKVTAMKCFLLELQVISLESGDASIHDTVENLIILANNSLSSNGNVTESGCKECEELEEKNIKEFLQSFVHIVQMFINTSGSGATNFSLLKQAGDVEENPGPKKSGVLFLLGIILLVLIGVQGTPVVRKGRCSCISTNQGTIHLQSLKDLKQFAPSPSCEKIEIIATLKNGVQTCLNPDSADVKELIKKWEKQVSQKKKQKNGKKHQKKKVLKVRKSQRSRQKKTTGSGVKQTLNFDLLKLAGDVESNPGPMCHQQLVISWFSLVFLASPLVAIWELKKDVYVVELDWYPDAPGEMVVLTCDTPEEDGITWTLDQSSEVLGSGKTLTIQVKEFGDAGQYTCHKGGEVLSHSLLLLHKKEDGIWSTDILKDQKEPKNKTFLRCEAKNYSGRFTCWWLTTISTDLTFSVKSSRGSSDPQGVTCGAATLSAERVRGDNKEYEYSVECQEDSACPAAEESLPIEVMVDAVHKLKYENYTSSFFIRDIIKPDPPKNLQLKPLKNSRQVEVSWEYPDTWSTPHSYFSLTFCVQVQGKSKREKKDRVFTDKTSATVICRKNASISVRAQDRYYSSSWSEWASVPCSGGGGSGGGGSGGGGSRNLPVATPDPGMFPCLHHSQNLLRAVSNMLQKARQTLEFYPCTSEEIDHEDITKDKTSTVEACLPLELTKNESCLNSRETSFITNGSCLASRKTSFMMALCLSSIYEDLKMYQVEFKTMNAKLLMDPKRQIFLDQNMLAVIDELMQALNFNSETVPQKSSLEEPDFYKTKIKLCILLHAFRIRAVTIDRVMSYLNAS

SEQ ID NO: 63 - protein, 1208 aa, Artificial Sequence
  Protein sequence encoded by NG-761 transgene cassette
MDWTWRILFLVAAATGAHSNWVNVISDLKKIEDLIQSMHIDATLYTESDVHPSCKVTAMKCFLLELQVISLESGDASIHDTVENLIILANNSLSSNGNVTESGCKECEELEEKNIKEFLQSFVHIVQMFINTSGSGQCTNYALLKLAGDVESNPGPAQSLALSLLILVLAFGIPRTQGSDGGAQDCCLKYSQRKIPAKVVRSYRKQEPSLGCSIPAILFLPRKRSQAELCADPKELWVQQLMQHLDKTPSPQKPAQGCRKDRGASKTGKKGKGSKGCKRTERSQTPKGPGSGEGRGSLLTCGDVEENPGPALTFALLVALLVLSCKSSCSVGCDLPQTHSLGSRRTLMLLAQMRRISLFSCLKDRHDFGFPQEEFGNQFQKAETIPVLHEMIQQIFNLFSTKDSSAAWDETLLDKFYTELYQQLNDLEACVIQGVGVTETPLMKEDSILAVRKYFQRITLYLKEKKYSPCAWEVVRAEIMRSFSLSTNLQESLRSKEGSGATNFSLLKQAGDVEENPGPKKSGVLFLLGIILLVLIGVQGTPVVRKGRCSCISTNQGTIHLQSLKDLKQFAPSPSCEKIEIIATLKNGVQTCLNPDSADVKELIKKWEKQVSQKKKQKNGKKHQKKKVLKVRKSQRSRQKKTTGSGVKQTLNFDLLKLAGDVESNPGPMCHQQLVISWFSLVFLASPLVAIWELKKDVYVVELDWYPDAPGEMVVLTCDTPEEDGITWTLDQSSEVLGSGKTLTIQVKEFGDAGQYTCHKGGEVLSHSLLLLHKKEDGIWSTDILKDQKEPKNKTFLRCEAKNYSGRFTCWWLTTISTDLTFSVKSSRGSSDPQGVTCGAATLSAERVRGDNKEYEYSVECQEDSACPAAEESLPIEVMVDAVHKLKYENYTSSFFIRDIIKPDPPKNLQLKPLKNSRQVEVSWEYPDTWSTPHSYFSLTFCVQVQGKSKREKKDRVFTDKTSATVICRKNASISVRAQDRYYSSSWSEWASVPCSGGGGSGGGGSGGGGSRNLPVATPDPGMFPCLHHSQNLLRAVSNMLQKARQTLEFYPCTSEEIDHEDITKDKTSTVEACLPLELTKNESCLNSRETSFITNGSCLASRKTSFMMALCLSSIYEDLKMYQVEFKTMNAKLLMDPKRQIFLDQNMLAVIDELMQALNFNSETVPQKSSLEEPDFYKTKIKLCILLHAFRIRAVTIDRVMSYLNAS

SEQ ID NO: 64 - protein, 905 aa, Artificial Sequence
  Protein sequence encoded by NG-762 transgene cassette
MDWTWRILFLVAAATGAHSNWVNVISDLKKIEDLIQSMHIDATLYTESDVHPSCKVTAMKCFLLELQVISLESGDASIHDTVENLIILANNSLSSNGNVTESGCKECEELEEKNIKEFLQSFVHIVQMFINTSGSGATNFSLLKQAGDVEENPGPALTFALLVALLVLSCKSSCSVGCDLPQTHSLGSRRTLMLLAQMRRISLFSCLKDRHDFGFPQEEFGNQFQKAETIPVLHEMIQQIFNLFSTKDSSAAWDETLLDKFYTELYQQLNDLEACVIQGVGVTETPLMKEDSILAVRKYFQRITLYLKEKKYSPCAWEVVRAEIMRSFSLSTNLQESLRSKEGSGQCTNYALLKLAGDVESNPGPMCHQQLVISWFSLVFLASPLVAIWELKKDVYVVELDWYPDAPGEMVVLTCDTPEEDGITWTLDQSSEVLGSGKTLTIQVKEFGDAGQYTCHKGGEVLSHSLLLLHKKEDGIWSTDILKDQKEPKNKTFLRCEAKNYSGRFTCWWLTTISTDLTFSVKSSRGSSDPQGVTCGAATLSAERVRGDNKEYEYSVECQEDSACPAAEESLPIEVMVDAVHKLKYENYTSSFFIRDIIKPDPPKNLQLKPLKNSRQVEVSWEYPDTWSTPHSYFSLTFCVQVQGKSKREKKDRVFTDKTSATVICRKNASISVRAQDRYYSSSWSEWASVPCSGGGGSGGGGSGGGGSRNLPVATPDPGMFPCLHHSQNLLRAVSNMLQKARQTLEFYPCTSEEIDHEDITKDKTSTVEACLPLELTKNESCLNSRETSFITNGSCLASRKTSFMMALCLSSIYEDLKMYQVEFKTMNAKLLMDPKRQIFLDQNMLAVIDELMQALNFNSETVPQKSSLEEPDFYKTKIKLCILLHAFRIRAVTIDRVMSYLNAS

SEQ ID NO: 65 - protein, 904 aa, Artificial Sequence
  Protein sequence encoded by NG-763 transgene cassette
MDWTWRILFLVAAATGAHSNWVNVISDLKKIEDLIQSMHIDATLYTESDVHPSCKVTAMKCFLLELQVISLESGDASIHDTVENLIILANNSLSSNGNVTESGCKECEELEEKNIKEFLQSFVHIVQMFINTSGSGEGRGSLLTCGDVEENPGPALTFALLVALLVLSCKSSCSVGCDLPQTHSLGSRRTLMLLAQMRRISLFSCLKDRHDFGFPQEEFGNQFQKAETIPVLHEMIQQIFNLFSTKDSSAAWDETLLDKFYTELYQQLNDLEACVIQGVGVTETPLMKEDSILAVRKYFQRITLYLKEKKYSPCAWEVVRAEIMRSFSLSTNLQESLRSKEGSGQCTNYALLKLAGDVESNPGPMCHQQLVISWFSLVFLASPLVAIWELKKDVYVVELDWYPDAPGEMVVLTCDTPEEDGITWTLDQSSEVLGSGKTLTIQVKEFGDAGQYTCHKGGEVLSHSLLLLHKKEDGIWSTDILKDQKEPKNKTFLRCEAKNYSGRFTCWWLTTISTDLTFSVKSSRGSSDPQGVTCGAATLSAERVRGDNKEYEYSVECQEDSACPAAEESLPIEVMVDAVHKLKYENYTSSFFIRDIIKPDPPKNLQLKPLKNSRQVEVSWEYPDTWSTPHSYFSLTFCVQVQGKSKREKKDRVFTDKTSATVICRKNASISVRAQDRYYSSSWSEWASVPCSGGGGSGGGGSGGGGSRNLPVATPDPGMFPCLHHSQNLLRAVSNMLQKARQTLEFYPCTSEEIDHEDITKDKTSTVEACLPLELTKNESCLNSRETSFITNGSCLASRKTSFMMALCLSSIYEDLKMYQVEFKTMNAKLLMDPKRQIFLDQNMLAVIDELMQALNFNSETVPQKSSLEEPDFYKTKIKLCILLHAFRIRAVTIDRVMSYLNAS

SEQ ID NO: 66 - protein, 908 aa, Artificial Sequence
  Protein sequence encoded by NG-764 transgene cassette
MDWTWRILFLVAAATGAHSNWVNVISDLKKIEDLIQSMHIDATLYTESDVHPSCKVTAMKCFLLELQVISLESGDASIHDTVENLIILANNSLSSNGNVTESGCKECEELEEKNIKEFLQSFVHIVQMFINTSGSGVKQTLNFDLLKLAGDVESNPGPALTFALLVALLVLSCKSSCSVGCDLPQTHSLGSRRTLMLLAQMRRISLFSCLKDRHDFGFPQEEFGNQFQKAETIPVLHEMIQQIFNLFSTKDSSAAWDETLLDKFYTELYQQLNDLEACVIQGVGVTETPLMKEDSILAVRKYFQRITLYLKEKKYSPCAWEVVRAEIMRSFSLSTNLQESLRSKEGSGQCTNYALLKLAGDVESNPGPMCHQQLVISWFSLVFLASPLVAIWELKKDVYVVELDWYPDAPGEMVVLTCDTPEEDGITWTLDQSSEVLGSGKTLTIQVKEFGDAGQYTCHKGGEVLSHSLLLLHKKEDGIWSTDILKDQKEPKNKTFLRCEAKNYSGRFTCWWLTTISTDLTFSVKSSRGSSDPQGVTCGAATLSAERVRGDNKEYEYSVECQEDSACPAAEESLPIEVMVDAVHKLKYENYTSSFFIRDIIKPDPPKNLQLKPLKNSRQVEVSWEYPDTWSTPHSYFSLTFCVQVQGKSKREKKDRVFTDKTSATVICRKNASISVRAQDRYYSSSWSEWASVPCSGGGGSGGGGSGGGGSRNLPVATPDPGMFPCLHHSQNLLRAVSNMLQKARQTLEFYPCTSEEIDHEDITKDKTSTVEACLPLELTKNESCLNSRETSFITNGSCLASRKTSFMMALCLSSIYEDLKMYQVEFKTMNAKLLMDPKRQIFLDQNMLAVIDELMQALNFNSETVPQKSSLEEPDFYKTKIKLCILLHAFRIRAVTIDRVMSYLNAS

SEQ ID NO: 67 - protein, 844 aa, Artificial Sequence
  Protein sequence encoded by NG-765 transgene cassette
MDWTWRILFLVAAATGAHSNWVNVISDLKKIEDLIQSMHIDATLYTESDVHPSCKVTAMKCFLLELQVISLESGDASIHDTVENLIILANNSLSSNGNVTESGCKECEELEEKNIKEFLQSFVHIVQMFINTSGSGATNFSLLKQAGDVEENPGPKKSGVLFLLGIILLVLIGVQGTPVVRKGRCSCISTNQGTIHLQSLKDLKQFAPSPSCEKIEIIATLKNGVQTCLNPDSADVKELIKKWEKQVSQKKKQKNGKKHQKKKVLKVRKSQRSRQKKTTGSGVKQTLNFDLLKLAGDVESNPGPMCHQQLVISWFSLVFLASPLVAIWELKKDVYVVELDWYPDAPGEMVVLTCDTPEEDGITWTLDQSSEVLGSGKTLTIQVKEFGDAGQYTCHKGGEVLSHSLLLLHKKEDGIWSTDILKDQKEPKNKTFLRCEAKNYSGRFTCWWLTTISTDLTFSVKSSRGSSDPQGVTCGAATLSAERVRGDNKEYEYSVECQEDSACPAAEESLPIEVMVDAVHKLKYENYTSSFFIRDIIKPDPPKNLQLKPLKNSRQVEVSWEYPDTWSTPHSYFSLTFCVQVQGKSKREKKDRVFTDKTSATVICRKNASISVRAQDRYYSSSWSEWASVPCSGGGGSGGGGSGGGGSRNLPVATPDPGMFPCLHHSQNLLRAVSNMLQKARQTLEFYPCTSEEIDHEDITKDKTSTVEACLPLELTKNESCLNSRETSFITNGSCLASRKTSFMMALCLSSIYEDLKMYQVEFKTMNAKLLMDPKRQIFLDQNMLAVIDELMQALNFNSETVPQKSSLEEPDFYKTKIKLCILLHAFRIRAVTIDRVMSYLNAS

SEQ ID NO: 68 - protein, 1207 aa, Artificial Sequence
  Protein sequence encoded by NG-768 transgene cassette
MKKSGVLFLLGIILLVLIGVQGTPVVRKGRCSCISTNQGTIHLQSLKDLKQFAPSPSCEKIEIIATLKNGVQTCLNPDSADVKELIKKWEKQVSQKKKQKNGKKHQKKKVLKVRKSQRSRQKKTTGSGEGRGSLLTCGDVEENPGPAQSLALSLLILVLAFGIPRTQGSDGGAQDCCLKYSQRKIPAKVVRSYRKQEPSLGCSIPAILFLPRKRSQAELCADPKELWVQQLMQHLDKTPSPQKPAQGCRKDRGASKTGKKGKGSKGCKRTERSQTPKGPGSGATNFSLLKQAGDVEENPGPALTFALLVALLVLSCKSSCSVGCDLPQTHSLGSRRTLMLLAQMRRISLFSCLKDRHDFFPQEEFGNQFQKAETIPVLHEMIQQIFNLFSTKDSSAAWDETLLDKFYTELYQQLNDLEACVIQGVGVTETPLMKEDSILAVRKYFQRITLYLKEKKYSPCAWEVVRAEIMRSFSLSTNLQESLRSKEGSGQCTNYALLKLAGDVESNPGPDWTWRILFLVAAATGAHSNWVNVISDLKKIEDLIQSMHIDATLYTESDVHPSCKVTAMKCFLLELQVISLESGDASIHDTVENLIILANNSLSSNGNVTESGCKECEELEEKNIKEFLQSFVHIVQMFINTSGSGVKQTLNFDLLKLAGDVESNPGPMCHQQLVISWFSLVFLASPLVAIWELKKDVYVVELDWYPDAPGEMVVLTCDTPEEDGITWTLDQSSEVLGSGKTLTIQVKEFGDAGQYTCHKGGEVLSHSLLLLHKKEDGIWSTDILKDQKEPKNKTFLRCEAKNYSGRFTCWWLTTISTDLTFSVKSSRGSSDPQGVTCGAATLSAERVRGDNKEYEYSVECQEDSACPAAEESLPIEVMVDAVHKLKYENYTSSFFIRDIIKPDPPKNLQLKPLKNSRQVEVSWEYPDTWSTPHSYFSLTFCVQVQGKSKREKKDRVFTDKTSATVICRKNASISVRAQDRYYSSSWSEWASVPCSGGGGSGGGGSGGGGSRNLPVATPDPGMFPCLHHSQNLLRAVSNMLQKARQTLEFYPCTSEEIDHEDITKDKTSTVEACLPLELTKNESCLNSRETSFITNGSCLASRKTSFMMALCLSSIYEDLKMYQVEFKTMNAKLLMDPKRQIFLDQNMLAVIDELMQALNFNSETVPQKSSLEEPDFYKTKIKLCILLHAFRIRAVTIDRVMSYLNAS

SEQ ID NO: 69 - protein, 1176 aa, Artificial Sequence
  Protein sequence encoded by NG-769 transgene cassette
MAQSLALSLLILVLAFGIPRTQGSDGGAQDCCLKYSQRKIPAKVVRSYRKQEPSLGCSIPAILFLPRKRSQAELCADPKELWVQQLMQHLDKTPSPQKPAQGGSGATNFSLLKQAGDVEENPGPDWTWRILFLVAAATGAHSNWVNVISDLKKIEDLIQSMHIDATLYTESDVHPSCKVTAMKCFLLELQVISLESGDASIHDTVENLIILANNSLSSNGNVTESGCKECEELEEKNIKEFLQSFVHIVQMFINTSGSGEGRGSLLTCGDVEENPGPALTFALLVALLVLSCKSSCSVGCDLPQTHSLGSRRTLMLLAQMRRISLFSCLKDRHDFGFPQEEFGNQFQKAETIPVLHEMIQQIFNLFSTKDSSAAWDETLLDKFYTELYQQLNDLEACVIQGVGVTETPLMKEDSILAVRKYFQRITLYLKEKKYSPCAWEVVRAEIMRSFSLSTNLQESLRSKEGSGQCTNYALLKLAGDVESNPGPKKSGVLFLLGIILLVLIGVQGTPVVRKGRCSCISTNQGTIHLQSLKDLKQFAPSPSCEKIEIIATLKNGVQTCLNPDSADVKELIKKWEKQVSQKKKQKNGKKHQKKKVLKVRKSQRSRQKKTTGSGVKQTLNFDLLKLAGDVESNPGPMCHQQLVISWFSLVFLASPLVAIWELKKDVYVVELDWYPDAPGEMVVLTCDTPEEDGITWTLDQSSEVLGSGKTLTIQVKEFGDAGQYTCHKGGEVLSHSLLLLHKKEDGIWSTDILKDQKEPKNKTFLRCEAKNYSGRFTCWWLTTISTDLTFSVKSSRGSSDPQGVTCGAATLSAERVRGDNKEYEYSVECQEDSACPAAEESLPIEVMVDAVHKLKYENYTSSFFIRDIIKPDPPKNLQLKPLKNSRQVEVSWEYPDTWSTPHSYFSLTFCVQVQGKSKREKKDRVFTDKTSATVICRKNASISVRAQDRYYSSSWSEWASVPCSGGGGSGGGGSGGGGSRNLPVATPDPGMFPCLHHSQNLLRAVSNMLQKARQTLEFYPCTSEEIDHEDITKDKTSTVEACLPLELTKNESCLNSRETSFITNGSCLASRKTSFMMALCLSSIYEDLKMYQVEFKTMNAKLLMDPKRQIFLDQNMLAVIDELMQALNFNSETVPQKSSLEEPDFYKTKIKLCILLHAFRIRAVTIDRVMSYLNAS

SEQ ID NO: 70 - protein, 1176 aa, Artificial Sequence
  Protein sequence encoded by NG-770 transgene cassette
MDWTWRILFLVAAATGAHSNWVNVISDLKKIEDLIQSMHIDATLYTESDVHPSCKVTAMKCFLLELQVISLESGDASIHDTVENLIILANNSLSSNGNVTESGCKECEELEEKNIKEFLQSFVHIVQMFINTSGSGATNFSLLKQAGDVEENPGPAQSLALSLLILVLAFGIPRTQGSDGGAQDCCLKYSQRKIPAKVVRSYRKQEPSLGCSIPAILFLPRKRSQAELCADPKELWVQQLMQHLDKTPSPQKPAQGGSGEGRGSLLTCGDVEENPGPALTFALLVALLVLSCKSSCSVGCDLPQTHSLGSRRTLMLLAQMRRISLFSCLKDRHDFGFPQEEFGNQFQKAETIPVLHEMIQQIFNLFSTKDSSAAWDETLLDKFYTELYQQLNDLEACVIQGVGVTETPLMKEDSILAVRKYFQRITLYLKEKKYSPCAWEVVRAEIMRSFSLSTNLQESLRSKEGSGQCTNYALLKLAGDVESNPGPKKSGVLFLLGIILLVLIGVQGTPVVRKGRCSCISTNQGTIHLQSLKDLKQFAPSPSCEKIEIIATLKNGVQTCLNPDSADVKELIKKWEKQVSQKKKQKNGKKHQKKKVLKVRKSQRSRQKKTTGSGVKQTLNFDLLKLAGDVESNPGPMCHQQLVISWFSLVFLASPLVAIWELKKDVYVVELDWYPDAPGEMVVLTCDTPEEDGITWTLDQSSEVLGSGKTLTIQVKEFGDAGQYTCHKGGEVLSHSLLLLHKKEDGIWSTDILKDQKEPKNKTFLRCEAKNYSGRFTCWWLTTISTDLTFSVKSSRGSSDPQGVTCGAATLSAERVRGDNKEYEYSVECQEDSACPAAEESLPIEVMVDAVHKLKYENYTSSFFIRDIIKPDPPKNLQLKPLKNSRQVEVSWEYPDTWSTPHSYFSLTFCVQVQGKSKREKKDRVFTDKTSATVICRKNASISVRAQDRYYSSSWSEWASVPCSGGGGSGGGGSGGGGSRNLPVATPDPGMFPCLHHSQNLLRAVSNMLQKARQTLEFYPCTSEEIDHEDITKDKTSTVEACLPLELTKNESCLNSRETSFITNGSCLASRKTSFMMALCLSSIYEDLKMYQVEFKTMNAKLLMDPKRQIFLDQNMLAVIDELMQALNFNSETVPQKSSLEEPDFYKTKIKLCILLHAFRIRAVTIDRVMSYLNAS

SEQ ID NO: 71 - protein, 1176 aa, Artificial Sequence
  Protein sequence encoded by NG-771 transgene cassette
MAQSLALSLLILVLAFGIPRTQGSDGGAQDCCLKYSQRKIPAKVVRSYRKQEPSLGCSIPAILFLPRKRSQAELCADPKELWVQQLMQHLDKTPSPQKPAQGGSGEGRGSLLTCGDVEENPGPDWTWRILFLVAAATGAHSNWVNVISDLKKIEDLIQSMHIDATLYTESDVHPSCKVTAMKCFLLELQVISLESGDASIHDTVENLIILANNSLSSNGNVTESGCKECEELEEKNIKEFLQSFVHIVQMFINTSGSGATNFSLLKQAGDVEENPGPALTFALLVALLVLSCKSSCSVGCDLPQTHSLGSRRTLMLLAQMRRISLFSCLKDRHDFGFPQEEFGNQFQKAETIPVLHEMIQQIFNLFSTKDSSAAWDETLLDKFYTELYQQLNDLEACVIQGVGVTETPLMKEDSILAVRKYFQRITLYLKEKKYSPCAWEVVRAEIMRSFSLSTNLQESLRSKEGSGQCTNYALLKLAGDVESNPGPKKSGVLFLLGIILLVLIGVQGTPVVRKGRCSCISTNQGTIHLQSLKDLKQFAPSPSCEKIEIIATLKNGVQTCLNPDSADVKELIKKWEKQVSQKKKQKNGKKHQKKKVLKVRKSQRSRQKKTTGSGVKQTLNFDLLKLAGDVESNPGPMCHQQLVISWFSLVFLASPLVAIWELKKDVYVVELDWYPDAPGEMVVLTCDTPEEDGITWTLDQSSEVLGSGKTLTIQVKEFGDAGQYTCHKGGEVLSHSLLLLHKKEDGIWSTDILKDQKEPKNKTFLRCEAKNYSGRFTCWWLTTISTDLTFSVKSSRGSSDPQGVTCGAATLSAERVRGDNKEYEYSVECQEDSACPAAEESLPIEVMVDAVHKLKYENYTSSFFIRDIIKPDPPKNLQLKPLKNSRQVEVSWEYPDTWSTPHSYFSLTFCVQVQGKSKREKKDRVFTDKTSATVICRKNASISVRAQDRYYSSSWSEWASVPCSGGGGSGGGGSGGGGSRNLPVATPDPGMFPCLHHSQNLLRAVSNMLQKARQTLEFYPCTSEEIDHEDITKDKTSTVEACLPLELTKNESCLNSRETSFITNGSCLASRKTSFMMALCLSSIYEDLKMYQVEFKTMNAKLLMDPKRQIFLDQNMLAVIDELMQALNFNSETVPQKSSLEEPDFYKTKIKLCILLHAFRIRAVTIDRVMSYLNAS

SEQ ID NO: 72 - protein, 1176 aa, Artificial Sequence
  Protein sequence encoded by NG-772 transgene cassette
MDWTWRILFLVAAATGAHSNWVNVISDLKKIEDLIQSMHIDATLYTESDVHPSCKVTAMKCFLLELQVISLESGDASIHDTVENLIILANNSLSSNGNVTESGCKECEELEEKNIKEFLQSFVHIVQMFINTSGSGEGRGSLLTCGDVEENPGPAQSLALSLLILVLAFGIPRTQGSDGGAQDCCLKYSQRKIPAKVVRSYRKQEPSLGCSIPAILFLPRKRSQAELCADPKELWVQQLMQHLDKTPSPQKPAQGGSGATNFSLLKQAGDVEENPGPALTFALLVALLVLSCKSSCSVGCDLPQTHSLGSRRTLMLLAQMRRISLFSCLKDRHDFGFPQEEFGNQFQKAETIPVLHEMIQQIFNLFSTKDSSAAWDETLLDKFYTELYQQLNDLEACVIQGVGVTETPLMKEDSILAVRKYFQRITLYLKEKKYSPCAWEVVRAEIMRSFSLSTNLQESLRSKEGSGQCTNYALLKLAGDVESNPGPKKSGVLFLLGIILLVLIGVQGTPVVRKGRCSCISTNQGTIHLQSLKDLKQFAPSPSCEKIEIIATLKNGVQTCLNPDSADVKELIKKWEKQVSQKKKQKNGKKHQKKKVLKVRKSQRSRQKKTTGSGVKQTLNFDLLKLAGDVESNPGPMCHQQLVISWFSLVFLASPLVAIWELKKDVYVVELDWYPDAPGEMVVLTCDTPEEDGITWTLDQSSEVLGSGKTLTIQVKEFGDAGQYTCHKGGEVLSHSLLLLHKKEDGIWSTDILKDQKEPKNKTFLRCEAKNYSGRFTCWWLTTISTDLTFSVKSSRGSSDPQGVTCGAATLSAERVRGDNKEYEYSVECQEDSACPAAEESLPIEVMVDAVHKLKYENYTSSFFIRDIIKPDPPKNLQLKPLKNSRQVEVSWEYPDTWSTPHSYFSLTFCVQVQGKSKREKKDRVFTDKTSATVICRKNASISVRAQDRYYSSSWSEWASVPCSGGGGSGGGGSGGGGSRNLPVATPDPGMFPCLHHSQNLLRAVSNMLQKARQTLEFYPCTSEEIDHEDITKDKTSTVEACLPLELTKNESCLNSRETSFITNGSCLASRKTSFMMALCLSSIYEDLKMYQVEFKTMNAKLLMDPKRQIFLDQNMLAVIDELMQALNFNSETVPQKSSLEEPDFYKTKIKLCILLHAFRIRAVTIDRVMSYLNAS

SEQ ID NO: 73 - protein, 1176 aa, Artificial Sequence
  Protein sequence encoded by NG-773 transgene cassette
MKKSGVLFLLGIILLVLIGVQGTPVVRKGRCSCISTNQGTIHLQSLKDLKQFAPSPSCEKIEIIATLKNGVQTCLNPDSADVKELIKKWEKQVSQKKKQKNGKKHQKKKVLKVRKSQRSRQKKTTGSGEGRGSLLTCGDVEENPGPAQSLALSLLILVLAFGIPRTQGSDGGAQDCCLKYSQRKIPAKVVRSYRKQEPSLGCSIPAILFLPRKRSQAELCADPKELWVQQLMQHLDKTPSPQKPAQGGSGATNFSLLKQAGDVEENPGPALTFALLVALLVLSCKSSCSVGCDLPQTHSLGSRRTLMLLAQMRRISLFSCLKDRHDFGFPQEEFGNQFQKAETIPVLHEMIQQIFNLFSTKDSSAAWDETLLDKFYTELYQQLNDLEACVIQGVGVTETPLMKEDSILAVRKYFQRITLYLKEKKYSPCAWEVVRAEIMRSFSLSTNLQESLRSKEGSGQCTNYALLKLAGDVESNPGPDWTWRILFLVAAATGAHSNWVNVISDLKKIEDLIQSMHIDATLYTESDVHPSCKVTAMKCFLLELQVISLESGDASIHDTVENLIILANNSLSSNGNVTESGCKECEELEEKNIKEFLQSFVHIVQMFINTSGSGVKQTLNFDLLKLAGDVESNPGPMCHQQLVISWFSLVFLASPLVAIWELKKDVYVVELDWYPDAPGEMVVLTCDTPEEDGITWTLDQSSEVLGSGKTLTIQVKEFGDAGQYTCHKGGEVLSHSLLLLHKKEDGIWSTDILKDQKEPKNKTFLRCEAKNYSGRFTCWWLTTISTDLTFSVKSSRGSSDPQGVTCGAATLSAERVRGDNKEYEYSVECQEDSACPAAEESLPIEVMVDAVHKLKYENYTSSFFIRDIIKPDPPKNLQLKPLKNSRQVEVSWEYPDTWSTPHSYFSLTFCVQVQGKSKREKKDRVFTDKTSATVICRKNASISVRAQDRYYSSSWSEWASVPCSGGGGSGGGGSGGGGSRNLPVATPDPGMFPCLHHSQNLLRAVSNMLQKARQTLEFYPCTSEEIDHEDITKDKTSTVEACLPLELTKNESCLNSRETSFITNGSCLASRKTSFMMALCLSSIYEDLKMYQVEFKTMNAKLLMDPKRQIFLDQNMLAVIDELMQALNFNSETVPQKSSLEEPDFYKTKIKLCILLHAFRIRAVTIDRVMSYLNAS

SEQ ID NO: 74 - DNA, 34333 bp, Artificial Sequence
  Genome sequence of NG-701 virus
tctatctatataatataccttatagatggaatggtgccaatatgtaaatgaggtgattttaaaaagtgtggatcgtgtggtgattggctgtggggttaacggctaaaaggggcggtgcgaccgtgggaaaatgacgttttgtgggggtggagtttttttgcaagttgtcgcgggaaatgtgacgcataaaaaggcttttttctcacggaactacttagttttcccacggtatttaacaggaaatgaggtagttttgaccggatgcaagtgaaaattgttgattttcgcgcgaaaactgaatgaggaagtgtttttctgaataatgtggtatttatggcagggtggagtatttgttcagggccaggtagactttgacccattacgtggaggtttcgattaccgtgttttttacctgaatttccgcgtaccgtgtcaaagtcttctgtttttacgtaggtgtcagctgatcgctagggtatttatacctcagggtttgtgtcaagaggccactcttgagtgccagcgagaagagttttctcctctgcgccggcagtttaataataaaaaaatgagagatttgcgatttctgcctcaggaaataatctctgctgagactggaaatgaaatattggagcttgtggtgcacgccctgatgggagacgatccggagccacctgtgcagctttttgagcctcctacgcttcaggaactgtatgatttagaggtagagggatcggaggattctaatgaggaagctgtaaatggcttttttaccgattctatgcttttagctgctaatgaagggttagaattagatccgcctttggacacttttgatactccaggggtaattgtggaaagcggtacaggtgtaagaaaattacctgatttgagttccgtggactgtgatttgcactgctatgaagacgggtttcctccgagtgatgaggaggaccatgaaaaggagcagtccatgcagactgcagcgggtgagggagtgaaggctgccaatgttggttttcagttggattgcccggagcttcctggacatggctgtaagtcttgtgaatttcacaggaaaaatactggagtaaaggaactgttatgttcgctttgttatatgagaacgcactgccactttatttacagtaagtgtgtttaagttaaaatttaaaggaatatgctgtttttcacatgtatattgagtgtgagttttgtgcttcttattataggtcctgtgtctgatgctgatgaatcaccatctcctgattctactacctcacctcctgagattcaagcacctgttcctgtggacgtgcgcaagcccattcctgtgaagcttaagcctgggaaacgtccagcagtggaaaaacttgaggacttgttacagggtggggacggacctttggacttgagtacacggaaacgtccaagacaataagtgttccatatccgtgtttacttaaggtgacgtcaatatttgtgtgacagtgcaatgtaataaaaatatgttaactgttcactggtttttattgctttttgggcggggactcaggtatataagtagaagcagacctgtgtggttagctcataggagctggctttcatccatggaggtttgggccattttggaagaccttaggaagactaggcaactgttagagaacgcttcggacggagtctccggtttttggagattctggttcgctagtgaattagctagggtagtttttaggataaaacaggactataaacaagaatttgaaaagttgttggtagattgcccaggactttttgaagctcttaatttgggccatcaggttcactttaaagaaaaagttttatcagttttagacttttcaaccccaggtagaactgctgctgctgtggcttttcttacttttatattagataaatggatcccgcagactcatttcagcaggggatacgttttggatttcatagccacagcattgtggagaacatggaaggttcgcaagatgaggacaatcttaggttactggccagtgcagcctttgggtgtagcgggaatcctgaggcatccaccggtcatgccagcggttctggaggaggaacagcaagaggacaacccgagagccggcctggaccctccagtggaggaggcggagtagctgacttgtctcctgaactgcaacgggtgcttactggatctacgtccactggacgggataggggcgttaagagggagagggcatctagtggtactgatgctagatctgagttggctttaagtttaatgagtcgcagacgtcctgaaaccatttggtggcatgaggttcagaaagagggaagggatgaagtttctgtattgcaggagaaatattcactggaacaggtgaaaacatgttggttggagcctgaggatgattgggaggtggccattaaaaattatgccaagatagctttgaggcctgataaacagtataagattactagacggattaatatccggaatgcttgttacatatctggaaatggggctgaggtggtaatagatactcaagacaaggcagttattagatgctgcatgatggatatgtggcctggggtagtcggtatggaagcagtaacttttgtaaatgttaagtttaggggagatggttataatggaatagtgtttatggccaataccaaacttatattgcatggttgtagcttttttggtttcaacaatacctgtgtagatgcctggggacaggttagtgtacggggatgtagtttctatgcgtgttggattgccacagctggcagaaccaagagtcaattgtctctgaagaaatgcatatttcaaagatgtaacctgggcattctgaatgaaggcgaagcaagggtccgccactgcgcttctacagatactggatgttttattttgattaagggaaatgccagcgtaaagcataacatgatttgcggtgcttccgatgagaggccttatcaaatgctcacttgtgctggtgggcattgtaatatgctggctactgtgcatattgtttcccatcaacgcaaaaaatggcctgtttttgatcacaatgtgatgacgaagtgtaccatgcatgcaggtgggcgtagaggaatgtttatgccttaccagtgtaacatgaatcatgtgaaagtgttgttggaaccagatgccttttccagaatgagcctaacaggaatttttgacatgaacatgcaaatctggaagatcctgaggtatgatgatacgagatcgagggtacgcgcatgcgaatgcggaggcaagcatgccaggttccagccggtgtgtgtagatgtgactgaagatctcagaccggatcatttggttattgcccgcactggagcagagttcggatccagtggagaagaaactgactaaggtgagtattgggaaaactttggggtgggattttcagatggacagattgagtaaaaatttgttttttctgtcttgcagctgtcatgagtggaaacgcttcttttaaggggggagtcttcagcccttatctgacagggcgtctcccatcctgggcaggagttcgtcagaatgttatgggatctactgtggatggaagacccgtccaacccgccaattcttcaacgctgacctatgctactttaagttcttcacctttggacgcagctgcagctgccgccgccgcttctgttgccgctaacactgtgcttggaatgggttactatggaagcatcatggctaattccacttcctctaataacccttctaccctgactcaggacaagttacttgtccttttggcccagctggaggctttgacccaacgtctgggtgaactttctcagcaggtggtcgagttgcgagtacaaactgagtctgctgtcggcacggcaaagtctaaataaaaaaatcccagaatcaatgaataaataaacaagcttgttgttgatttaaaatcaagtgtttttatttcatttttcgcgcacggtatgccctagaccaccgatctctatcattgagaactcggtggattttttccaggatcctatagaggtgggattgaatgtttagatacatgggcattaggccgtctttggggtggagatagctccattgaagggattcatgctccggggtagtgttgtaaatcacccagtcataacaaggtcgcagtgcatggtgttgcacaatatcttttagaagtaggctgattgccacagataagcccttggtgtaggtgtttacaaaccggttgagctgggatgggtgcattcggggtgaaattatgtgcattttggattggatttttaagttggcaatattgccgccaagatcccgtcttgggttcatgttatgaaggaccaccaagacggtgtatccggtacatttaggaaatttatcgtgcagcttggatggaaaagcgtggaaaaatttggagacacccttgtgtcctccaagattttccatgcactcatccatgataatagcaatggggccgtgggcagcggcgcgggcaaacacgttccgtgggtctgacacatcatagttatgttcctgagttaaatcatcataagccattttaatgaatttggggcggagagtaccagattggggtatgaatgttccttcgggccccggagcatagttcccctcacagatttgcatttcccaagctttcagttccgagggtggaatcatgtccacctggggggctatgaaaaacaccgtttctggggcgggggtgattaattgtgatgatagcaaatttctgagcaattgagatttgccacatccggtggggccataaatgattccgattacgggttgcaggtggtagtttagggaacggcaactgccgtcttctcgaagcaagggggccacctcgttcatcatttcccttacatgcatattttcccgcaccaaatccattaggaggcgctctcctcctagtgatagaagttcttgtagtgaggaaaagtttttcagcggtttcagaccgtcagccatgggcattttggagagagtttgctgcaaaagttctagtctgttccacagttcagtgatgtgttctatggcatctcgatccagcagacctcctcgtttcgcgggtttggacggctcctggaatagggtatgagacgatgggcgtccagcgctgccagggttcggtccttccagggtctcagtgttcgagtcagggttgtttccgtcacagtgaaggggtgtgcgcctgcttgggcgcttgccagggtgcgcttcagactcatcctgctggtcgaaaacttctgtcgcttggcgccctgtatgtcggccaagtagcagtttaccatgagttcgtagttgagcgcctcggctgcgtggcctttggcgcggagcttacctttggaagttttcttgcataccgggcagtataggcatttcagcgcatacaacttgggcgcaaggaaaacggattctggggagtatgcatctgcgccgcaggaggcgcaaacagtttcacattccaccagccaggttaaatccggttcattggggtcaaaaacaagttttccgccatattttttgatgcgtttcttacctttggtctccatgagttcgtgtcctcgttgagtgacaaacaggctgtccgtgtccccgtagactgattttacaggcctcttctccagtggagtgcctcggtcttcttcgtacaggaactctgaccactctgatacaaaggcgcgcgtccaggccagcacaaaggaggctatgtgggaggggtagcgatcgttgtcaaccagggggtccaccttttccaaagtatgcaaacacatgtcaccctcttcaacatccaggaatgtgattggcttgtaggtgtatttcacgtgacctggggtccccgctgggggggtataaaagggggcggttctttgctcttcctcactgtcttccggatcgctgtccaggaacgtcagctgttggggtaggtattccctctcgaaggcgggcatgacctctgcactcaggttgtcagtttctaagaacgaggaggatttgatattgacagtgccggttgagatgcctttcatgaggttttcgtccatctggtcagaaaacacaatttttttattgtcaagtttggtggcaaatgatccatacagggcgttggataaaagtttggcaatggatcgcatggtttggttcttttccttgtccgcgcgctctttggcggcgatgttgagttggacatactcgcgtgccaggcacttccattcggggaagatagttgttaattcatctggcacgattctcacttgccaccctcgattatgcaaggtaattaaatccacactggtggccacctcgcctcgaaggggttcattggtccaacagagcctacctcctttcctagaacagaaagggggaagtgggtctagcataagttcatcgggagggtctgcatccatggtaaagattcccggaagtaaatccttatcaaaatagctgatgggagtggggtcatctaaggccatttgccattctcgagctgccagtgcgcgctcatatgggttaaggggactgccccatggcatgggatgggtgagtgcagaggcatacatgccacagatgtcatagacgtagatgggatcctcaaagatgcctatgtaggttggatagcatcgcccccctctgatacttgctcgcacatagtcatatagttcatgtgatggcgctagcagccccggacccaagttggtgcgattgggtttttctgttctgtagacgatctggcgaaagatggcgtgagaattggaagagatggtgggtctttgaaaaatgttgaaatgggcatgaggtagacctacagagtctctgacaaagtgggcataagattcttgaagcttggttaccagttcggcggtgacaagtacgtctagggcgcagtagtcaagtgtttcttgaatgatgtcataacctggttggtttttcttttcccacagttcgcggttgagaaggtattcttcgcgatccttccagtactcttctagcggaaacccgtctttgtctgcacggtaagatcctagcatgtagaactgattaactgccttgtaagggcagcagcccttctctacgggtagagagtatgcttgagcagcttttcgtagcgaagcgtgagtaagggcaaaggtgtctctgaccatgactttgaggaattggtatttgaagtcgatgtcgtcacaggctccctgttcccagagttggaagtctacccgtttcttgtaggcggggttgggcaaagcgaaagtaacatcattgaagagaatcttgccggccctgggcatgaaattgcgagtgatgcgaaaaggctgtggtacttccgctcggttattgataacctgggcagctaggacgatctcgtcgaaaccgttgatgttgtgtcctacgatgtataattctatgaaacgcggcgtgcctctgacgtgaggtagcttactgagctcatcaaaggttaggtctgtggggtcagataaggcgtagtgttcgagagcccattcgtgcaggtgaggattcgctttaaggaaggaggaccagaggtccactgccagtgctgtttgtaactggtcccggtactgacgaaaatgccgtccgactgccattttttctggggtgacgcaatagaaggtttgggggtcctgccgccagcgatcccacttgagttttatggcgaggtcataggcgatgttgacgagccgctggtctccagagagtttcatgaccagcatgaaggggattagctgcttgccaaaggaccccatccaggtgtaggtttccacatcgtaggtgagaaagagcctttctgtgcgaggatgagagccaatcgggaagaactggatctcctgccaccagttggaggaatggctgttgatgtgatggaagtagaactccctgcgacgcgccgagcattcatgcttgtgcttgtacagacggccgcagtagtcgcagcgttgcacgggttgtatctcgtgaatgagttgtacctggcttcccttgacgagaaatttcagtgggaagccgaggcctggcgattgtatctcgtgctttactatgttgtctgcatcggcctgttcatcttctgtctcgatggtggtcatgctgacgagccctcgcgggaggcaagtccagacctcggcgcggcaggggcggagctcgaggacgagagcgcgcaggctggagctgtccagggtcctgagacgctgcggactcaggttagtaggcagtgtcaggagattaacttgcatgatcttttggagggcgtgcgggaggttcagatagtacttgatctcaacgggtccgttggtggagatgtcgatggcttgcagggttccgtgtcccttgggcgctaccaccgtgcccttgtttttcattttggacggcggtggctctgttgcttcttgcatgtttagaagcggtgtcgagggcgcgcaccgggcggcaggggcggctcgggacccggcggcatggctggcagtggtacgtcggcgccgcgcgcgggtaggttctggtactgcgccctgagaagactcgcatgcgcgacgacgcggcggttgacatcctggatctgacgcctctgggtgaaagctaccggccccgtgagcttgaacctgaaagagagttcaacagaatcaatctcggtatcgttgacggcggcttgcctaaggatttcttgcacgtcaccagagttgtcctggtaggcgatctccgccatgaactgctcgatctcttcctcttgaagatctccgcggcccgctctctcgacggtggccgcgaggtcgttggagatgcgcccaatgagttgagagaatgcattcatgcccgcctcgttccagacgcggctgtagaccacggcccccacgggatctctcgcgcgcatgaccacctgggcgaggttgagctccacgtggcgggtgaagaccgcatagttgcataggcgctggaaaaggtagttgagtgtggtggcgatgtgctcggtgacgaagaaatacatgatccatcgtctcagcggcatctcgctgacatcgcccagagcttccaagcgctccatggcctcgtagaagtccacggcaaaattaaaaaactgggagtttcgcgcggacacggtcaactcctcttccagaagacggataagttcggcgatggtggtgcgcacctcgcgctcgaaagcccctgggatttcttcctcaatctcttcttcttccactaacatctcttcctcttcaggtggggctgcaggaggagggggaacgcggcgacgccggcggcgcacgggcagacggtcgatgaatctttcaatgacctctccgcggcggcggcgcatggtttcagtgacggcgcggccgttctcgcgcggtcgcagagtaaaaacaccgccgcgcatctccttaaagtggtgactgggaggttctccgtttgggagggagagggcgctgattatacattttattaattggcccgtagggactgcacgcagagatctgatcgtgtcaagatccacgggatctgaaaacctttcgacgaaagcgtctaaccagtcacagtcacaaggtaggctgagtacggcttcttgtgggcgggggtggttatgtgttcggtctgggtcttctgtttcttcttcatctcgggaaggtgagacgatgctgctggtgatgaaattaaagtaggcagttctaagacggcggatggtggcgaggagcaccaggtctttgggtccggcttgctggatacgcaggcgattggccattccccaagcattatcctgacatctagcaagatctttgtagtagtcttgcatgagccgttctacgggcacttcttcctcacccgttctgccatgcatacgtgtgagtccaaatccgcgcattggttgtaccagtgccaagtcagctacgactctttcggcgaggatggcttgctgtacttgggtaagggtggcttgaaagtcatcaaaatccacaaagcggtggtaagctcctgtattaatggtgtaagcacagttggccatgactgaccagttaactgtctggtgaccagggcgcacgagctcggtgtatttaaggcgcgaataggcgcgggtgtcaaagatgtaatcgttgcaggtgcgcaccagatactggtaccctataagaaaatgcggcggtggttggcggtagagaggccatcgttctgtagctggagcgccaggggcgaggtcttccaacataaggcggtgatagccgtagatgtacctggacatccaggtgattcctgcggcggtagtagaagcccgaggaaactcgcgtacgcggttccaaatgttgcgtagcggcatgaagtagttcattgtaggcacggtttgaccagtgaggcgcgcgcagtcattgatgctctatagacacggagaaaatgaaagcgttcagcgactcgactccgtagcctggaggaacgtgaacgggttgggtcgcggtgtaccccggttcgagacttgtactcgagccggccggagccgcggctaacgtggtattggcactcccgtctcgacccagcctacaaaaatccaggatacggaatcgagtcgttttgctggtttccgaatggcagggaagtgagtcctattttttttttttgccgctcagatgcatcccgtgctgcgacagatgcgcccccaacaacagcccccctcgcagcagcagcagcagcaatcacaaaaggctgtccctgcaactactgcaactgccgccgtgagcggtgcgggacagcccgcctatgatctggacttggaagagggcgaaggactggcacgtctaggtgcgccttcacccgagcggcatccgcgagttcaactgaaaaaagattctcgcgaggcgtatgtgccccaacagaacctatttagagacagaagcggcgaggagccggaggagatgcgagcttcccgctttaacgcgggtcgtgagctgcgtcacggtttggaccgaagacgagtgttgcgggacgaggatttcgaagttgatgaaatgacagggatcagtcctgccagggcacacgtggctgcagccaaccttgtatcggcttacgagcagacagtaaaggaagagcgtaacttccaaaagtcttttaataatcatgtgcgaaccctgattgcccgcgaagaagttacccttggtttgatgcatttgtgggatttgatggaagctatcattcagaaccctactagcaaacctctgaccgcccagctgtttctggtggtgcaacacagcagagacaatgaggctttcagagaggcgctgctgaacatcaccgaacccgaggggagatggttgtatgatcttatcaacattctacagagtatcatagtgcaggagcggagcctgggcctggccgagaaggtggctgccatcaattactcggttttgagcttgggaaaatattacgctcgcaaaatctacaagactccatacgttcccatagacaaggaggtgaagatagatgggttctacatgcgcatgacgctcaaggtcttgaccctgagcgatgatcttggggtgtatcgcaatgacagaatgcatcgcgcggttagcgccagcaggaggcgcgagttaagcgacagggaactgatgcacagtttgcaaagagctctgactggagctggaaccgagggtgagaattacttcgacatgggagctgacttgcagtggcagcctagtcgcagggctctgagcgccgcgacggcaggatgtgagcttccttacatagaagaggcggatgaaggcgaggaggaagagggcgagtacttggaagactgatggcacaacccgtgttttttgctagatggaacagcaagcaccggatcccgcaatgcgggcggcgctgcagagccagccgtccggcattaactcctcggacgattggacccaggccatgcaacgtatcatggcgttgacgactcgcaaccccgaagcctttagacagcaaccccaggccaaccgtctatcggccatcatggaagctgtagtgccttcccgctctaatcccactcatgagaaggtcctggccatcgtgaacgcgttggtggagaacaaagctattcgtccagatgaggccggactggtatacaacgctctcttagaacgcgtggctcgctacaacagtagcaatgtgcaaaccaatttggaccgtatgataacagatgtacgcgaagccgtgtctcagcgcgaaaggttccagcgtgatgccaacctgggttcgctggtggcgttaaatgctttcttgagtactcagcctgctaatgtgccgcgtggtcaacaggattatactaactttttaagtgctttgagactgatggtatcagaagtacctcagagcgaagtgtatcagtccggtcctgattacttctttcagactagcagacagggcttgcagacggtaaatctgagccaagcttttaaaaaccttaaaggtttgtggggagtgcatgccccggtaggagaaagagcaaccgtgtctagcttgttaactccgaactcccgcctattattactgttggtagctcctttcaccgacagcggtagcatcgaccgtaattcctatttgggttacctactaaacctgtatcgcgaagccatagggcaaagtcaggtggacgagcagacctatcaagaaattacccaagtcagtcgcgctttgggacaggaagacactggcagtttggaagccactctgaacttcttgcttaccaatcggtctcaaaagatccctcctcaatatgctcttactgcggaggaggagaggatccttagatatgtgcagcagagcgtgggattgtttctgatgcaagagggggcaactccgactgcagcactggacatgacagcgcgaaatatggagcccagcatgtatgccagtaaccgacctttcattaacaaactgctggactacttgcacagagctgccgctatgaactctgattatttcaccaatgccatcttaaacccgcactggctgcccccacctggtttctacacgggcgaatatgacatgcccgaccctaatgacggatttctgtgggacgacgtggacagcgatgttttttcacctctttctgatcatcgcacgtggaaaaaggaaggcggcgatagaatgcattcttctgcatcgctgtccggggtcatgggtgctaccgcggctgagcccgagtctgcaagtccttttcctagtctacccttttctctacacagtgtacgtagcagcgaagtgggtagaataagtcgcccgagtttaatgggcgaagaggagtatctaaacgattccttgctcagaccggcaagagaaaaaaatttcccaaacaatggaatagaaagtttggtggataaaatgagtagatggaagacttatgctcaggatcacagagacgagcctgggatcatggggattacaagtagagcgagccgtagacgccagcgccatgacagacagaggggtcttgtgtgggacgatgaggattcggccgatgatagcagcgtgctggacttgggtgggagaggaaggggcaacccgtttgctcatttgcgccctcgcttgggtggtatgttgtaaaaaaaaataaaaaaaaaactcaccaaggccatggcgacgagcgtacgttcgttcttctttattatctgtgtctagtataatgaggcgagtcgtgctaggcggagcggtggtgtatccggagggtcctcctccttcgtacgagagcgtgatgcagcagcagcaggcgacggcggtgatgcaatccccactggaggctccctttgtgcctccgcgatacctggcacctacggagggcagaaacagcattcgttattcggaactggcacctcagtacgataccaccaggttgtatctggtggacaacaagtcggcggacattgcttctctgaactatcagaatgaccacagcaacttcttgaccacggtggtgcaaaacaatgactttacccctacggaagccagcacccagaccattaactttgatgaacgatcgcggtggggcggtcagctaaagaccatcatgcatactaacatgccaaacgtgaacgagtatatgtttagtaacaagttcaaagcgcgtgtgatggtgtccagaaaacctcccgacggtgctgcagttggggatacttatgatcacaagcaggatattttgaaatatgagtggttcgagtttactttgccagaaggcaacttttcagttactatgactattgatttgatgaacaatgccatcatagataattacttgaaagtgggtagacagaatggagtgcttgaaagtgacattggtgttaagttcgacaccaggaacttcaagctgggatgggatcccgaaaccaagttgatcatgcctggagtgtatacgtatgaagccttccatcctgacattgtcttactgcctggctgcggagtggattttaccgagagtcgtttgagcaaccttcttggtatcagaaaaaaacagccatttcaagagggttttaagattttgtatgaagatttagaaggtggtaatattccggccctcttggatgtagatgcctatgagaacagtaagaaagaacaaaaagccaaaatagaagctgctacagctgctgcagaagctaaggcaaacatagttgccagcgactctacaagggttgctaacgctggagaggtcagaggagacaattttgcgccaacacctgttccgactgcagaatcattattggccgatgtgtctgaaggaacggacgtgaaactcactattcaacctgtagaaaaagatagtaagaatagaagctataatgtgttggaagacaaaatcaacacagcctatcgcagttggtatctttcgtacaattatggcgatcccgaaaaaggagtgcgttcctggacattgctcaccacctcagatgtcacctgcggagcagagcaggtctactggtcgcttccagacatgatgaaggatcctgtcactttccgctccactagacaagtcagtaactaccctgtggtgggtgcagagcttatgcccgtcttctcaaagagcttctacaacgaacaagctgtgtactcccagcagctccgccagtccacctcgcttacgcacgtcttcaaccgctttcctgagaaccagattttaatccgtccgccggcgcccaccattaccaccgtcagtgaaaacgttcctgctctcacagatcacgggaccctgccgttgcgcagcagtatccggggagtccaacgtgtgaccgttactgacgccagacgccgcacctgtccctacgtgtacaaggcactgggcatagtcgcaccgcgcgtcctttcaagccgcactttctaaaaaaaaaaaaaatgtccattcttatctcgcccagtaataacaccggttggggtctgcgcgctccaagcaagatgtacggaggcgcacgcaaacgttctacccaacatcctgtccgtgttcgcggacattttcgcgctccatggggcgccctcaagggccgcactcgcgttcgaaccaccgtcgatgatgtaatcgatcaggtggttgccgacgcccgtaattatactcctactgcgcctacatctactgtggatgcagttattgacagtgtagtggctgacgctcgcaactatgctcgacgtaagagccggcgaaggcgcattgccagacgccaccgagctaccactgccatgcgagccgcaagagctctgctacgaagagctagacgcgtggggcgaagagccatgcttagggcggccagacgtgcagcttcgggcgccagcgccggcaggtcccgcaggcaagcagccgctgtcgcagcggcgactattgccgacatggcccaatcgcgaagaggcaatgtatactgggtgcgtgacgctgccaccggtcaacgtgtacccgtgcgcacccgtccccctcgcacttagaagatactgagcagtctccgatgttgtgtcccagcggcgaggatgtccaagcgcaaatacaaggaagaaatgctgcaggttatcgcacctgaagtctacggccaaccgttgaaggatgaaaaaaaaccccgcaaaatcaagcgggttaaaaaggacaaaaaagaagaggaagatggcgatgatgggctggcggagtttgtgcgcgagtttgccccacggcgacgcgtgcaatggcgtgggcgcaaagttcgacatgtgttgagacctggaacttcggtggtctttacacccggcgagcgttcaagcgctacttttaagcgttcctatgatgaggtgtacggggatgatgatattcttgagcaggcggctgaccgattaggcgagtttgcttatggcaagcgtagtagaataacttccaaggatgagacagtgtcgatacccttggatcatggaaatcccacccctagtcttaaaccggtcactttgcagcaagtgttacccgtaactccgcgaacaggtgttaaacgcgaaggtgaagatttgtatcccactatgcaactgatggtacccaaacgccagaagttggaggacgttttggagaaagtaaaagtggatccagatattcaacctgaggttaaagtgagacccattaagcaggtagcgcctggtctgggggtacaaactgtagacattaagattcccactgaaagtatggaagtgcaaactgaacccgcaaagcctactgccacctccactgaagtgcaaacggatccatggatgcccatgcctattacaactgacgccgccggtcccactcgaagatcccgacgaaagtacggtccagcaagtctgttgatgcccaattatgttgtacacccatctattattcctactcctggttaccgaggcactcgctactatcgcagccgaaacagtacctcccgccgtcgccgcaagacacctgcaaatcgcagtcgtcgccgtagacgcacaagcaaaccgactcccggcgccctggtgcggcaagtgtaccgcaatggtagtgcggaacctttgacactgccgcgtgcgcgttaccatccgagtatcatcacttaatcaatgttgccgctgcctccttgcagatatggccctcacttgtcgccttcgcgttcccatcactggttaccgaggaagaaactcgcgccgtagaagagggatgttgggacgcggaatgcgacgctacaggcgacggcgtgctatccgcaagcaattgcggggtggttttttaccagccttaattccaattatcgctgctgcaattggcgcgataccaggcatagcttccgtggcggttcaggcctcgcaacgacattgacattggaaaaaaacgtataaataaaaaaaaaaaaatacaatggactctgacactcctggtcctgtgactatgttttcttagagatggaagacatcaatttttcatccttggctccgcgacacggcacgaagccgtacatgggcacctggagcgacatcggcacgagccaactgaacgggggcgccttcaattggagcagtatctggagcgggcttaaaaattttggctcaaccataaaaacatacgggaacaaagcttggaacagcagtacaggacaggcgcttagaaataaacttaaagaccagaacttccaacaaaaagtagtcgatgggatagcttccggcatcaatggagtggtagatttggctaaccaggctgtgcagaaaaagataaacagtcgtttggacccgccgccagcaaccccaggtgaaatgcaagtggaggaagaaattcctccgccagaaaaacgaggcgacaagcgtccgcgtcccgatttggaagagacgctggtgacgcgcgtagatgaaccgccttcttatgaggaagcaacgaagcttggaatgcccaccactagaccgatagccccaatggccaccggggtgatgaaaccttctcagttgcatcgacccgtcaccttggatttgccccctccccctgctgctactgctgtacccgcttctaagcctgtcgctgccccgaaaccagtcgccgtagccaggtcacgtcccgggggcgctcctcgtccaaatgcgcactggcaaaatactctgaacagcatcgtgggtctaggcgtgcaaagtgtaaaacgccgtcgctgcttttaattaaatatggagtagcgcttaacttgcctatctgtgtatatgtgtcattacacgccgtcacagcagcagaggaaaaaaggaagaggtcgtgcgtcgacgctgagttactttcaagatggccaccccatcgatgctgccccaatgggcatacatgcacatcgccggacaggatgcttcggagtacctgagtccgggtctggtgcagttcgcccgcgccacagacacctacttcaatctgggaaataagtttagaaatcccaccgtagcgccgacccacgatgtgaccaccgaccgtagccagcggctcatgttgcgcttcgtgcccgttgaccgggaggacaatacatactcttacaaagtgcggtacaccctggccgtgggcgacaacagagtgctggatatggccagcacgttctttgacattaggggtgtgttggacagaggtcccagtttcaaaccctattctggtacggcttacaactccctggctcctaaaggcgctccaaatacatctcagtggattgcagaaggtgtaaaaaatacaactggtgaggaacacgtaacagaagaggaaaccaatactactacttacacttttggcaatgctcctgtaaaagctgaagctgaaattacaaaagaaggactcccagtaggtttggaagtttcagatgaagaaagtaaaccgatttatgctgataaaacatatcagccagaacctcagctgggagatgaaacttggactgaccttgatggaaaaaccgaaaagtatggaggcagggctctcaaacccgatactaagatgaaaccatgctacgggtcctttgccaaacctactaatgtgaaaggcggtcaggcaaaacaaaaaacaacggagcagccaaatcagaaagtcgaatatgatatcgacatggagttttttgatgcggcatcgcagaaaacaaacttaagtcctaaaattgtcatgtatgcagaaaatgtaaatttggaaactccagacactcatgtagtgtacaaacctggaacagaagacacaagttccgaagctaatttgggacaacaatctatgcccaacagacccaactacattggcttcagagataactttattggacttatgtactataacagtactggtaacatgggggtgctggctggtcaagcgtctcagttaaatgcagtggttgacttgcaggacagaaacacagaactttcttaccaactcttgcttgactctctgggcgacagaaccagatactttagcatgtggaatcaggctgtggacagttatgatcctgatgtacgtgttattgaaaatcatggtgtggaagatgaacttcccaactactgttttccactggacggcataggtgttccaacaaccagttacaaatcaatagttccaaatggagacaatgcgcctaattggaaggaacctgaagtaaatggaacaagtgagatcggacagggtaatttgtttgccatggaaattaaccttcaagccaatctatggcgaagtttcctttattccaatgtggctctatatctcccagactcgtacaaatacaccccgtccaatgtcactcttccagaaaacaaaaacacctacgactacatgaacgggcgggtggtgccgccatctctagtagacacctatgtgaacattggtgccaggtggtctctggatgccatggacaatgtcaacccattcaaccaccaccgtaacgctggcttgcgttaccgatccatgcttctgggtaacggacgttatgtgcctttccacatacaagtgcctcaaaaattcttcgctgttaaaaacctgctgcttctcccaggctcctacacttatgagtggaactttaggaaggatgtgaacatggttctacagagttccctcggtaacgacctgcgggtagatggcgccagcatcagtttcacgagcatcaacctctatgctacttttttccccatggctcacaacaccgcttccacccttgaagccatgctgcggaatgacaccaatgatcagtcattcaacgactacctatctgcagctaacatgctctaccccattcctgccaatgcaaccaatattcccatttccattccttctcgcaactgggcggctttcagaggctggtcatttaccagactgaaaaccaaagaaactccctctttggggtctggatttgacccctactttgtctattctggttctattccctacctggatggtaccttctacctgaaccacacttttaagaaggtttccatcatgtttgactcttcagtgagctggcctggaaatgacaggttactatctcctaacgaatttgaaataaagcgcactgtggatggcgaaggctacaacgtagcccaatgcaacatgaccaaagactggttcttggtacagatgctcgccaactacaacatcggctatcagggcttctacattccagaaggatacaaagatcgcatgtattcatttttcagaaacttccagcccatgagcaggcaggtggttgatgaggtcaattacaaagacttcaaggccgtcgccataccctaccaacacaacaactctggctttgtgggttacatggctccgaccatgcgccaaggtcaaccctatcccgctaactatccctatccactcattggaacaactgccgtaaatagtgttacgcagaaaaagttcttgtgtgacagaaccatgtggcgcataccgttctcgagcaacttcatgtctatgggggcccttacagacttgggacagaatatgctctatgccaactcagctcatgctctggacatgacctttgaggtggatcccatggatgagcccaccctgctttatcttctcttcgaagttttcgacgtggtcagagtgcatcagccacaccgcggcatcatcgaggcagtctacctgcgtacaccgttctcggccggtaacgctaccacgtaagaagcttcttgcttcttgcaaatagcagctgcaaccatggcctgcggatcccaaaacggctccagcgagcaagagctcagagccattgtccaagacctgggttgcggaccctattttttgggaacctacgataagcgcttcccggggttcatggcccccgataagctcgcctgtgccattgtaaatacggccggacgtgagacggggggagagcactggttggctttcggttggaacccacgttctaacacctgctacctttttgatccttttggattctcggatgatcgtctcaaacagatttaccagtttgaatatgagggtctcctgcgccgcagcgctcttgctaccaaggaccgctgtattacgctggaaaaatctacccagaccgtgcagggtccccgttctgccgcctgcggacttttctgctgcatgttccttcacgcctttgtgcactggcctgaccgtcccatggacggaaaccccaccatgaaattgctaactggagtgccaaacaacatgcttcattctcctaaagtccagcccaccctgtgtgacaatcaaaaagcactctaccattttcttaatacccattcgccttattttcgctcccatcgtacacacatcgaaagggccactgcgttcgaccgtatggatgttcaataatgactcatgtaaacaacgtgttcaataaacatcactttatttttttacatgtatcaaggctctgcattacttatttatttacaagtcgaatgggttctgacgagaatcagaatgacccgcaggcagtgatacgttgcggaactgatacttgggttgccacttgaattcgggaatcaccaacttgggaaccggtatatcgggcaggatgtcactccacagctttctggtcagctgcaaagctccaagcaggtcaggagccgaaatcttgaaatcacaattaggaccagtgctttgagcgcgagagttgcggtacaccggattgcagcactgaaacaccatcagcgacggatgtctcacgcttgccagcacggtgggatctgcaatcatgcccacatccagatcttcagcattggcaatgctgaacggggtcatcttgcaggtctgcctacccatggcgggcacccaattaggcttgtggttgcaatcgcagtgcagggggatcagtatcatcttggcctgatcctgtctgattcctggatacacggctctcatgaaagcatcatattgcttgaaagcctgctgggctttactaccctcggtataaaacatcccgcaggacctgctcgaaaactggttagctgcacagccggcatcattcacacagcagcgggcgtcattgttagctatttgcaccacacttctgccccagcggttttgggtgattttggttcgctcgggattctcctttaaggctcgttgtccgttctcgctggccacatccatctcgataatctgctccttctgaatcataatattgccatgcaggcacttcagcttgccctcataatcattgcagccatgaggccacaacgcacagcctgtacattcccaattatggtgggcgatctgagaaaaagaatgtatcattccctgcagaaatcttcccatcatcgtgctcagtgtcttgtgactagtgaaagttaactggatgcctcggtgctcctcgtttacgtactggtgacagatgcgcttgtattgttcgtgttgctcaggcattagtttaaaagaggttctaagttcgttatccagcctgtacttctccatcagcagacacatcacttccatgcctttctcccaagcagacaccaggggcaagctaatcggattcttaacagtgcaggcagcagctcctttagccagagggtcatctttagcgatcttctcaatgcttcttttgccatccttctcaacgatgcgcacgggcgggtagctgaaacccactgctacaagttgcgcctcttctctttcttcttcgctgtcttgactgatgtcttgcatggggatatgtttggtcttccttggcttctttttggggggtatcggaggaggaggactgtcgctccgttccggagacagggaggattgtgacgtttcgctcaccattaccaactgactgtcggtagaagaacctgaccccacacggcgacaggtgtttctcttcgggggcagaggtggaggcgattgcgaagggctgcggtccgacctggaaggcggatgactggcagaaccccttccgcgttcgggggtgtgctccctgtggcggtcgcttaactgatttccttcgcggctggccattgtgttctcctaggcagagaaacaacagacatggaaactcagccattgctgtcaacatcgccacgagtgccatcacatctcgtcctcagcgacgaggaaaaggagcagagcttaagcattccaccgcccagtcctgccaccacctctaccctagaagataaggaggtcgacgcatctcatgacatgcagaataaaaaagcgaaagagtctgagacagacatcgagcaagacccgggctatgtgacaccggtggaacacgaggaagagttgaaacgctttctagagagagaggatgaaaactgcccaaaacaacgagcagataactatcaccaagatgctggaaatagggatcagaacaccgactacctcatagggcttgacggggaagacgcgctccttaaacatctagcaagacagtcgctcatagtcaaggatgcattattggacagaactgaagtgcccatcagtgtggaagagctcagccgcgcctacgagcttaacctcttttcacctcgtactccccccaaacgtcagccaaacggcacctgcgagccaaatcctcgcttaaacttttatccagcttttgctgtgccagaagtactggctacctatcacatcttttttaaaaatcaaaaaattccagtctcctgccgcgctaatcgcacccgcgccgatgccctactcaatctgggacctggttcacgcttacctgatatagcttccttggaagaggttccaaagatcttcgagggtctgggcaataatgagactcgggccgcaaatgctctgcaaaagggagaaaatggcatggatgagcatcacagcgttctggtggaattggaaggcgataatgccagactcgcagtactcaagcgaagcatcgaggtcacacacttcgcatatcccgctgtcaacctgccccctaaagtcatgacggcggtcatggaccagttactcattaagcgcgcaagtcccctttcagaagacatgcatgacccagatgcctgtgatgagggtaaaccagtggtcagtgatgagcagctaacccgatggctgggcaccgactctcccagggatttggaagagcgtcgcaagcttatgatggccgtggtgctggttaccgtagaactagagtgtctccgacgtttctttaccgattcagaaaccttgcgcaaactcgaagagaatctgcactacacttttagacacggctttgtgcggcaggcatgcaagatatctaacgtggaactcaccaacctggtttcctacatgggtattctgcatgagaatcgcctaggacaaagcgtgctgcacagcaccctgaagggggaagcccgccgtgattacatccgcgattgtgtctatctgtacctgtgccacacgtggcaaaccggcatgggtgtatggcagcaatgtttagaagaacagaacttgaaagagcttgacaagctcttacagaaatctcttaaggttctgtggacagggttcgacgagcgcaccgtcgcttccgacctggcagacctcatcttcccagagcgtctcagggttactttgcgaaacggattgcctgactttatgagccagagcatgcttaacaattttcgctctttcatcctggaacgctccggtatcctgcccgccacctgctgcgcactgccctccgactttgtgcctctcacctaccgcgagtgccccccgccgctatggagtcactgctacctgttccgtctggccaactatctctcctaccactcggatgtgatcgaggatgtgagcggagacggcttgctggagtgtcactgccgctgcaatctgtgcacgccccaccggtccctagcttgcaacccccagttgatgagcgaaacccagataataggcacctttgaattgcaaggccccagcagccaaggcgatgggtcttctcctgggcaaagtttaaaactgaccccgggactgtggacctccgcctacttgcgcaagtttgctccggaagattaccacccctatgaaatcaagttctatgaggaccaatcacagcctccaaaggccgaactttcggcctgcgtcatcacccagggggcaattctggcccaattgcaagccatccaaaaatcccgccaagaatttctactgaaaaagggtaagggggtctaccttgacccccagaccggcgaggaactcaacacaaggttccctcaggatgtcccaacgacgagaaaacaagaagttgaaggtgcagccgccgcccccagaagatatggaggaagattgggacagtcaggcagaggaggcggaggaggacagtctggaggacagtctggaggaagacagtttggaggaggaaaacgaggaggcagaggaggtggaagaagtaaccgccgacaaacagttatcctcggctgcggagacaagcaacagcgctaccatctccgctccgagtcgaggaacccggcggcgtcccagcagtagatgggacgagaccggacgcttcccgaacccaaccagcgcttccaagaccggtaagaaggatcggcagggatacaagtcctggcgggggcataagaatgccatcatctcctgcttgcatgagtgcgggggcaacatatccttcacgcggcgctacttgctattccaccatggggtgaactttccgcgcaatgttttgcattactaccgtcacctccacagcccctactatagccagcaaatcccggcagtctcgacagataaagacagcggcggcgacctccaacagaaaaccagcagcggcagttagaaaatacacaacaagtgcagcaacaggaggattaaagattacagccaacgagccagcgcaaacccgagagttaagaaatcggatctttccaaccctgtatgccatcttccagcagagtcggggtcaagagcaggaactgaaaataaaaaaccgatctctgcgttcgctcaccagaagttgtttgtatcacaagagcgaagatcaacttcagcgcactctcgaggacgccgaggctctcttcaacaagtactgcgcgctgactcttaaagagtaggcagcgaccgcgcttattcaaaaaaggcgggaattacatcatcctcgacatgagtaaagaaattcccacgccttacatgtggagttatcaaccccaaatgggattggcggcaggcgcctcccaggactactccacccgcatgaattggctcagcgccgggccttctatgatttctcgagttaatgatatacgcgcctaccgaaaccaaatacttttggaacagtcagctcttaccaccacgccccgccaacaccttaatcccagaaattggcccgccgccctagtgtaccaggaaagtcccgctcccaccactgtattacttcctcgagacgcccaggccgaagtccaaatgactaatgcaggtgcgcagttagctggcggctccaccctatgtcgtcacaggcctcggcataatataaaacgcctgatgatcagaggccgaggtatccagctcaacgacgagtcggtgagctctccgcttggtctacgaccagacggaatctttcagattgccggctgcgggagatcttccttcacccctcgtcaggctgttctgactttggaaagttcgtcttcgcaaccccgctcgggcggaatcgggaccgttcaatttgtggaggagtttactccctctgtctacttcaaccccttctccggatctcctgggcattacccggacgagttcataccgaacttcgacgcgattagcgagtcagtggacggctacgattgatgtctggtgacgcggctgagctatctcggctgcgacatctagaccactgccgccgctttcgctgctttgcccgggaactcattgagttcatctacttcgaactccccaaggatcaccctcaaggtccggcccacggagtgcggatttctatcgaaggcaaaatagactctcgcctgcaacgaattttctcccagcggcccgtgctgatcgagcgagaccagggaaacaccacggtttccatctactgcatttgtaatcaccccggattgcatgaaagcctttgctgtcttatgtgtactgagtttaataaaaactgaattaagactctcctacggactgccgcttcttcaacccggattttacaaccagaagaacgaaacttttcctgtcgtccaggactctgttaacttcacctttcctactcacaaactagaagctcaacgactacaccgcttttccagaagcattttccctactaatactactttcaaaaccggaggtgagctccaaggtcttcctacagaaaacccttgggtggaagcgggccttgtagtgctaggaattcttgcgggtgggcttgtgattattctttgctacctatacacaccttgcttcactttcttagtggtgttgtggtattggtttaaaaaatggggcccatactagtcttgcttgttttactttcgcttttggaaccgggttctgccaattacgatccatgtctagacttcgacccagaaaactgcacacttacttttgcacccgacacaagccgcatctgtggagttcatcgcctctcttacgaacttggcccccaacgacaaaaatttacctgcatggtgggaatcaaccccatagttatcacccagcaaagtggagatactaagggttgcattcactgctcctgcgattccatcgagtgcacctacaccctgctgaagaccctatgcggcctaagagacctgctaccaatgaattaaaaaatgattaataaaaaatcacttacttgaaatcagcaataaggtctctgttgaaattttctcccagcagcacctcacttccctcttcccaactctggtattctaaaccccgttcagcggcatactttctccatactttaaaggggatgtcaaattttagctcctctcctgtacccacaatcttcatgtctttcttcccagatgaccaagagagtccggctcagtgactccttcaaccctgtctacccctatgaagatgaaagcacctcccaacacccctttataaacccagggtttatttccccaaatggcttcacacaaagcccaaacggagttcttactttaaaatgtttaaccccactaacaaccacaggcggatctctacagctaaaagtgggagggggacttacagtggatgacaccaacggttttttgaaagaaaacataagtgccaccacaccactcgttaagactggtcactctataggtttaccactaggagccggattgggaacgaatgaaaataaactttgtatcaaattaggacaaggacttacattcaattcaaacaacatttgcattgatgacaatattaacaccttatggacaggagtcaaccccaccgaagccaactgtcaaatcatgaactccagtgaatctaatgattgcaaattaattctaacactagttaaaactggagcactagtcactgcatttgtttatgttataggagtatctaacaattttaatatgctaactacacacagaaatataaattttactgcagagctgtttttcgattctactggtaatttactaactagactctcatccctcaaaactccacttaatcataaatcaggacaaaacatggctactggtgccattactaatgctaaaggtttcatgcccagcacgactgcctatcctttcaatgataattctagagaaaaagaaaactacatttacggaacttgttactacacagctagtgatcgcactgcttttcccattgacatatctgtcatgcttaaccgaagagcaataaatgacgagacatcatattgtattcgtataacttggtcctggaacacaggagatgccccagaggtgcaaacctctgctacaaccctagtcacctccccatttaccttttactacatcagagaagacgactgacaaataaagtttgcgatcgccaggcccaccatgtgtccagcgcgcagcctcctccttgtggctaccctggtcctcctggaccacctcagtttggccagaaacctccccgtggccactccagacccaggaatgttcccatgccttcaccactcccaaaacctgctgagggccgtcagcaacatgctccagaaggccagacaaactctagaattttacccttgcacttctgaagagattgatcatgaagatatcacaaaagataaaaccagcacagtggaggcctgtttaccattggaattaaccaagaatgagagttgcctaaattccagagagacctctttcataactaatgggagttgcctggcctccagaaagacctcttttatgatggccctgtgccttagtagtatttatgaagacttgaagatgtaccaggtggagttcaagaccatgaatgcaaagcttctgatggatcctaagaggcagatctttctagatcaaaacatgctggcagttattgatgagctgatgcaggccctgaatttcaacagtgagactgtgccacaaaaatcctcccttgaagaaccggatttttataaaactaaaatcaagctctgcatacttcttcatgctttcagaattcgggcagtgactattgatagagtgatgagctatctgaatgcttccggaagcggagctactaacttcagcctgctgaagcaggctggagacgtggaggagaaccctggaccttgtcaccagcagttggtcatctcttggttttccctggtttttctggcatctcccctcgtggccatatgggaactgaagaaagatgtttatgtcgtagaattggattggtatccggatgcccctggagaaatggtggtcctcacctgtgacacccctgaagaagatggtatcacctggaccttggaccagagcagtgaggtcttaggctctggcaaaaccctgaccatccaagtcaaagagtttggagatgctggccagtacacctgtcacaaaggaggcgaggttctaagccattcgctcctgctgcttcacaaaaaggaagatggaatttggtccactgatattttaaaggaccagaaagaacccaaaaataagacctttctaagatgcgaggccaagaattattctggacgtttcacctgctggtggctgacgacaatcagtactgatttgacattcagtgtcaaaagcagcagaggctcttctgacccccaaggggtgacgtgcggagctgctacactctctgcagagagagtcagaggggacaacaaggagtatgagtactcagtggagtgccaggaggacagtgcctgcccagctgctgaggagagtctgcccattgaggtcatggtggatgccgttcacaagctcaagtatgaaaactacaccagcagcttcttcatcagggacatcatcaaacctgacccacccaagaacttgcagctgaagccattaaagaattctcggcaggtggaggtcagctgggagtaccctgacacctggagtactccacattcctacttctccctgacattctgcgttcaggtccagggcaagagcaagagagaaaagaaagatagagtcttcacggacaagacctcagccacggtcatctgccgcaaaaatgccagcattagcgtgcgggcccaggaccgctactatagctcatcttggagcgaatgggcatctgtgccctgcagttaagctagcttgactgactgagatacagcgtaccttcagctcacagacatgataagatacattgatgagtttggacaaaccacaactagaatgcagtgaaaaaaatgctttatttgtgaaatttgtgatgctattgctttatttgtaaccattataagctgcaataaacaagttaacaacaacaattgcattcattttatgtttcaggttcagggggaggtgtgggaggttttttaaagcaagtaaaacctctacaaatgtggtagtcgtcagctatcctgcaggaacttgtttatttgaaaatcaattcacaaaatccgagtagttattttgcctcccccttcccatttaacagaatacaccaatctctccccacgcacagctttaaacatttggataccattagatatagacatggttttagattccacattccaaacagtttcagagcgagccaatctggggtcagtgatagataaaaatccatcgggatagtcttttaaagcgctttcacagtccaactgctgcggatgcgactccggagtctggatcacggtcatctggaagaagaacgatgggaatcataatccgaaaacggtatcggacgattgtgtctcatcaaacccacaagcagccgctgtctgcgtcgctccgtgcgactgctgtttatgggatcagggtccacagtgtcctgaagcatgattttaatagcccttaacatcaactttctggtgcgatgcgcgcagcaacgcattctgatttcactcaaatctttgcagtaggtacaacacattattacaatattgtttaataaaccataattaaaagcgctccagccaaaactcatatctgatataatcgcccctgcatgaccatcataccaaagtttaatataaattaaatgacgttccctcaaaaacacactacccacatacatgatctcttttggcatgtgcatattaacaatctgtctgtaccatggacaacgttggttaatcatgcaacccaatataaccttccggaaccacactgccaacaccgctcccccagccatgcattgaagtgaaccctgctgattacaatgacaatgaagaacccaattctctcgaccgtgaatcacttgagaatgaaaaatatctatagtggcacaacatagacataaatgcatgcatcttctcataatttttaactcctcaggatttagaaacatatcccagggaataggaagctcttgcagaacagtaaagctggcagaacaaggaagaccacgaacacaacttacactatgcatagtcatagtatcacaatctggcaacagcgggtggtcttcagtcatagaagctcgggtttcattttcctcacaacgtggtaactgggctctggtgtaagggtgatgtctggcgcatgatgtcgagcgtgcgcgcaaccttgtcataatggagttgcttcctgacattctcgtattttgtatagcaaaacgcggccctggcagaacacactcttcttcgccttctatcctgccgcttagcgtgttccgtgtgatagttcaagtacaaccacactcttaagttggtcaaaagaatgctggcttcagttgtaatcaaaactccatcgcatctaatcgttctgaggaaatcatccaagcaatgcaactggattgtgtttcaagcaggagaggagagggaagagacggaagaaccatgttaatttttattccaaacgatctcgcagtacttcaaattgtagatcgcgcagatggcatctctcgcccccactgtgttggtgaaaaagcacagctagatcaaaagaaatgcgattttcaaggtgctcaacggtggcttccagcaaagcctccacgcgcacatccaagaacaaaagaataccaaaagaaggagcattttctaactcctcaatcatcatattacattcctgcaccattcccagataattttcagctttccagccttgaattattcgtgtcagttcttgtggtaaatccaatccacacattacaaacaggtcccggagggcgccctccaccaccattcttaaacacaccctcataatgacaaaatatcttgctcctgtgtcacctgtagcgaattgagaatggcaacatcaattgacatgcccttggctctaagttcttctttaagttctagttgtaaaaactctctcatattatcaccaaactgcttagccagaagccccccgggaacaagagcaggggacgctacagtgcagtacaagcgcagacctccccaattggctccagcaaaaacaagattggaataagcatattgggaaccgccagtaatatcatcgaagttgctggaaatataatcaggcagagtttcttgtaaaaattgaataaaagaaaaatttgccaaaaaaacattcaaaacctctgggatgcaaatgcaataggttaccgcgctgcgctccaacattgttagttttgaattagtctgcaaaaataaaaaaaaaaacaagcgtcatatcatagtagcctgacgaacagatggataaatcagtctttccatcacaagacaagccacagggtctccagctcgaccctcgtaaaacctgtcatcatgattaaacaacagcaccgaaagttcctcgcggtgaccagcatgaataattcttgatgaagcatacaatccagacatgttagcatcagttaacgagaaaaaacagccaacatagcctttgggtataattatgcttaatcgtaagtatagcaaagccacccctcgcggatacaaagtaaaaggcacaggagaataaaaaatataattatttctctgctgctgttcaggcaacgtcgcccccggtccctctaaatacacatacaaagcctcatcagccatggcttaccagacaaagtacagcgggcacacaaagcacaagctctaaagtgactctccaacctctccacaatatatatatacacaagccctaaactgacgtaatgggagtaaagtgtaaaaaatcccgccaaacccaacacacaccccgaaactgcgtcaccagggaaaagtacagtttcacttccgcaatcccaacaggcgtaacttcctctttctcacggtacgtgatatcccactaacttgcaacgtcattttcccacggtcgcaccgccccttttagccgttaaccccacagccaatcaccacacgatccacactttttaaaatcacctcatttacatattggcaccattccatctataaggtatattatatagataga

SEQ ID NO: 75 - DNA, 34249 bp, Artificial Sequence
  Genome sequence of NG-702 virus
tctatctatataatataccttatagatggaatggtgccaatatgtaaatgaggtgattttaaaaagtgtggatcgtgtggtgattggctgtggggttaacggctaaaaggggcggtgcgaccgtgggaaaatgacgttttgtgggggtggagtttttttgcaagttgtcgcgggaaatgtgacgcataaaaaggcttttttctcacggaactacttagttttcccacggtatttaacaggaaatgaggtagttttgaccggatgcaagtgaaaattgttgattttcgcgcgaaaactgaatgaggaagtgtttttctgaataatgtggtatttatggcagggtggagtatttgttcagggccaggtagactttgacccattacgtggaggtttcgattaccgtgttttttacctgaatttccgcgtaccgtgtcaaagtcttctgtttttacgtaggtgtcagctgatcgctagggtatttatacctcagggtttgtgtcaagaggccactcttgagtgccagcgagaagagttttctcctctgcgccggcagtttaataataaaaaaatgagagatttgcgatttctgcctcaggaaataatctctgctgagactggaaatgaaatattggagcttgtggtgcacgccctgatgggagacgatccggagccacctgtgcagctttttgagcctcctacgcttcaggaactgtatgatttagaggtagagggatcggaggattctaatgaggaagctgtaaatggcttttttaccgattctatgcttttagctgctaatgaagggttagaattagatccgcctttggacacttttgatactccaggggtaattgtggaaagcggtacaggtgtaagaaaattacctgatttgagttccgtggactgtgatttgcactgctatgaagacgggtttcctccgagtgatgaggaggaccatgaaaaggagcagtccatgcagactgcagcgggtgagggagtgaaggctgccaatgttggttttcagttggattgcccggagcttcctggacatggctgtaagtcttgtgaatttcacaggaaaaatactggagtaaaggaactgttatgttcgctttgttatatgagaacgcactgccactttatttacagtaagtgtgtttaagttaaaatttaaaggaatatgctgtttttcacatgtatattgagtgtgagttttgtgcttcttattataggtcctgtgtctgatgctgatgaatcaccatctcctgattctactacctcacctcctgagattcaagcacctgttcctgtggacgtgcgcaagcccattcctgtgaagcttaagcctgggaaacgtccagcagtggaaaaacttgaggacttgttacagggtggggacggacctttggacttgagtacacggaaacgtccaagacaataagtgttccatatccgtgtttacttaaggtgacgtcaatatttgtgtgacagtgcaatgtaataaaaatatgttaactgttcactggtttttattgctttttgggcggggactcaggtatataagtagaagcagacctgtgtggttagctcataggagctggctttcatccatggaggtttgggccattttggaagaccttaggaagactaggcaactgttagagaacgcttcggacggagtctccggtttttggagattctggttcgctagtgaattagctagggtagtttttaggataaaacaggactataaacaagaatttgaaaagttgttggtagattgcccaggactttttgaagctcttaatttgggccatcaggttcactttaaagaaaaagttttatcagttttagacttttcaaccccaggtagaactgctgctgctgtggcttttcttacttttatattagataaatggatcccgcagactcatttcagcaggggatacgttttggatttcatagccacagcattgtggagaacatggaaggttcgcaagatgaggacaatcttaggttactggccagtgcagcctttgggtgtagcgggaatcctgaggcatccaccggtcatgccagcggttctggaggaggaacagcaagaggacaacccgagagccggcctggaccctccagtggaggaggcggagtagctgacttgtctcctgaactgcaacgggtgcttactggatctacgtccactggacgggataggggcgttaagagggagagggcatctagtggtactgatgctagatctgagttggctttaagtttaatgagtcgcagacgtcctgaaaccatttggtggcatgaggttcagaaagagggaagggatgaagtttctgtattgcaggagaaatattcactggaacaggtgaaaacatgttggttggagcctgaggatgattgggaggtggccattaaaaattatgccaagatagctttgaggcctgataaacagtataagattactagacggattaatatccggaatgcttgttacatatctggaaatggggctgaggtggtaatagatactcaagacaaggcagttattagatgctgcatgatggatatgtggcctggggtagtcggtatggaagcagtaacttttgtaaatgttaagtttaggggagatggttataatggaatagtgtttatggccaataccaaacttatattgcatggttgtagcttttttggtttcaacaatacctgtgtagatgcctggggacaggttagtgtacggggatgtagtttctatgcgtgttggattgccacagctggcagaaccaagagtcaattgtctctgaagaaatgcatatttcaaagatgtaacctgggcattctgaatgaaggcgaagcaagggtccgccactgcgcttctacagatactggatgttttattttgattaagggaaatgccagcgtaaagcataacatgatttgcggtgcttccgatgagaggccttatcaaatgctcacttgtgctggtgggcattgtaatatgctggctactgtgcatattgtttcccatcaacgcaaaaaatggcctgtttttgatcacaatgtgatgacgaagtgtaccatgcatgcaggtgggcgtagaggaatgtttatgccttaccagtgtaacatgaatcatgtgaaagtgttgttggaaccagatgccttttccagaatgagcctaacaggaatttttgacatgaacatgcaaatctggaagatcctgaggtatgatgatacgagatcgagggtacgcgcatgcgaatgcggaggcaagcatgccaggttccagccggtgtgtgtagatgtgactgaagatctcagaccggatcatttggttattgcccgcactggagcagagttcggatccagtggagaagaaactgactaaggtgagtattgggaaaactttggggtgggattttcagatggacagattgagtaaaaatttgttttttctgtcttgcagctgtcatgagtggaaacgcttcttttaaggggggagtcttcagcccttatctgacagggcgtctcccatcctgggcaggagttcgtcagaatgttatgggatctactgtggatggaagacccgtccaacccgccaattcttcaacgctgacctatgctactttaagttcttcacctttggacgcagctgcagctgccgccgccgcttctgttgccgctaacactgtgcttggaatgggttactatggaagcatcatggctaattccacttcctctaataacccttctaccctgactcaggacaagttacttgtccttttggcccagctggaggctttgacccaacgtctgggtgaactttctcagcaggtggtcgagttgcgagtacaaactgagtctgctgtcggcacggcaaagtctaaataaaaaaatcccagaatcaatgaataaataaacaagcttgttgttgatttaaaatcaagtgtttttatttcatttttcgcgcacggtatgccctagaccaccgatctctatcattgagaactcggtggattttttccaggatcctatagaggtgggattgaatgtttagatacatgggcattaggccgtctttggggtggagatagctccattgaagggattcatgctccggggtagtgttgtaaatcacccagtcataacaaggtcgcagtgcatggtgttgcacaatatcttttagaagtaggctgattgccacagataagcccttggtgtaggtgtttacaaaccggttgagctgggatgggtgcattcggggtgaaattatgtgcattttggattggatttttaagttggcaatattgccgccaagatcccgtcttgggttcatgttatgaaggaccaccaagacggtgtatccggtacatttaggaaatttatcgtgcagcttggatggaaaagcgtggaaaaatttggagacacccttgtgtcctccaagattttccatgcactcatccatgataatagcaatggggccgtgggcagcggcgcgggcaaacacgttccgtgggtctgacacatcatagttatgttcctgagttaaatcatcataagccattttaatgaatttggggcggagagtaccagattggggtatgaatgttccttcgggccccggagcatagttcccctcacagatttgcatttcccaagctttcagttccgagggtggaatcatgtccacctggggggctatgaaaaacaccgtttctggggcgggggtgattaattgtgatgatagcaaatttctgagcaattgagatttgccacatccggtggggccataaatgattccgattacgggttgcaggtggtagtttagggaacggcaactgccgtcttctcgaagcaagggggccacctcgttcatcatttcccttacatgcatattttcccgcaccaaatccattaggaggcgctctcctcctagtgatagaagttcttgtagtgaggaaaagtttttcagcggtttcagaccgtcagccatgggcattttggagagagtttgctgcaaaagttctagtctgttccacagttcagtgatgtgttctatggcatctcgatccagcagacctcctcgtttcgcgggtttggacggctcctggaatagggtatgagacgatgggcgtccagcgctgccagggttcggtccttccagggtctcagtgttcgagtcagggttgtttccgtcacagtgaaggggtgtgcgcctgcttgggcgcttgccagggtgcgcttcagactcatcctgctggtcgaaaacttctgtcgcttggcgccctgtatgtcggccaagtagcagtttaccatgagttcgtagttgagcgcctcggctgcgtggcctttggcgcggagcttacctttggaagttttcttgcataccgggcagtataggcatttcagcgcatacaacttgggcgcaaggaaaacggattctggggagtatgcatctgcgccgcaggaggcgcaaacagtttcacattccaccagccaggttaaatccggttcattggggtcaaaaacaagttttccgccatattttttgatgcgtttcttacctttggtctccatgagttcgtgtcctcgttgagtgacaaacaggctgtccgtgtccccgtagactgattttacaggcctcttctccagtggagtgcctcggtcttcttcgtacaggaactctgaccactctgatacaaaggcgcgcgtccaggccagcacaaaggaggctatgtgggaggggtagcgatcgttgtcaaccagggggtccaccttttccaaagtatgcaaacacatgtcaccctcttcaacatccaggaatgtgattggcttgtaggtgtatttcacgtgacctggggtccccgctgggggggtataaaagggggcggttctttgctcttcctcactgtcttccggatcgctgtccaggaacgtcagctgttggggtaggtattccctctcgaaggcgggcatgacctctgcactcaggttgtcagtttctaagaacgaggaggatttgatattgacagtgccggttgagatgcctttcatgaggttttcgtccatctggtcagaaaacacaatttttttattgtcaagtttggtggcaaatgatccatacagggcgttggataaaagtttggcaatggatcgcatggtttggttcttttccttgtccgcgcgctctttggcggcgatgttgagttggacatactcgcgtgccaggcacttccattcggggaagatagttgttaattcatctggcacgattctcacttgccaccctcgattatgcaaggtaattaaatccacactggtggccacctcgcctcgaaggggttcattggtccaacagagcctacctcctttcctagaacagaaagggggaagtgggtctagcataagttcatcgggagggtctgcatccatggtaaagattcccggaagtaaatccttatcaaaatagctgatgggagtggggtcatctaaggccatttgccattctcgagctgccagtgcgcgctcatatgggttaaggggactgccccatggcatgggatgggtgagtgcagaggcatacatgccacagatgtcatagacgtagatgggatcctcaaagatgcctatgtaggttggatagcatcgcccccctctgatacttgctcgcacatagtcatatagttcatgtgatggcgctagcagccccggacccaagttggtgcgattgggtttttctgttctgtagacgatctggcgaaagatggcgtgagaattggaagagatggtgggtctttgaaaaatgttgaaatgggcatgaggtagacctacagagtctctgacaaagtgggcataagattcttgaagcttggttaccagttcggcggtgacaagtacgtctagggcgcagtagtcaagtgtttcttgaatgatgtcataacctggttggtttttcttttcccacagttcgcggttgagaaggtattcttcgcgatccttccagtactcttctagcggaaacccgtctttgtctgcacggtaagatcctagcatgtagaactgattaactgccttgtaagggcagcagcccttctctacgggtagagagtatgcttgagcagcttttcgtagcgaagcgtgagtaagggcaaaggtgtctctgaccatgactttgaggaattggtatttgaagtcgatgtcgtcacaggctccctgttcccagagttggaagtctacccgtttcttgtaggcggggttgggcaaagcgaaagtaacatcattgaagagaatcttgccggccctgggcatgaaattgcgagtgatgcgaaaaggctgtggtacttccgctcggttattgataacctgggcagctaggacgatctcgtcgaaaccgttgatgttgtgtcctacgatgtataattctatgaaacgcggcgtgcctctgacgtgaggtagcttactgagctcatcaaaggttaggtctgtggggtcagataaggcgtagtgttcgagagcccattcgtgcaggtgaggattcgctttaaggaaggaggaccagaggtccactgccagtgctgtttgtaactggtcccggtactgacgaaaatgccgtccgactgccattttttctggggtgacgcaatagaaggtttgggggtcctgccgccagcgatcccacttgagttttatggcgaggtcataggcgatgttgacgagccgctggtctccagagagtttcatgaccagcatgaaggggattagctgcttgccaaaggaccccatccaggtgtaggtttccacatcgtaggtgagaaagagcctttctgtgcgaggatgagagccaatcgggaagaactggatctcctgccaccagttggaggaatggctgttgatgtgatggaagtagaactccctgcgacgcgccgagcattcatgcttgtgcttgtacagacggccgcagtagtcgcagcgttgcacgggttgtatctcgtgaatgagttgtacctggcttcccttgacgagaaatttcagtgggaagccgaggcctggcgattgtatctcgtgctttactatgttgtctgcatcggcctgttcatcttctgtctcgatggtggtcatgctgacgagccctcgcgggaggcaagtccagacctcggcgcggcaggggcggagctcgaggacgagagcgcgcaggctggagctgtccagggtcctgagacgctgcggactcaggttagtaggcagtgtcaggagattaacttgcatgatcttttggagggcgtgcgggaggttcagatagtacttgatctcaacgggtccgttggtggagatgtcgatggcttgcagggttccgtgtcccttgggcgctaccaccgtgcccttgtttttcattttggacggcggtggctctgttgcttcttgcatgtttagaagcggtgtcgagggcgcgcaccgggcggcaggggcggctcgggacccggcggcatggctggcagtggtacgtcggcgccgcgcgcgggtaggttctggtactgcgccctgagaagactcgcatgcgcgacgacgcggcggttgacatcctggatctgacgcctctgggtgaaagctaccggccccgtgagcttgaacctgaaagagagttcaacagaatcaatctcggtatcgttgacggcggcttgcctaaggatttcttgcacgtcaccagagttgtcctggtaggcgatctccgccatgaactgctcgatctcttcctcttgaagatctccgcggcccgctctctcgacggtggccgcgaggtcgttggagatgcgcccaatgagttgagagaatgcattcatgcccgcctcgttccagacgcggctgtagaccacggcccccacgggatctctcgcgcgcatgaccacctgggcgaggttgagctccacgtggcgggtgaagaccgcatagttgcataggcgctggaaaaggtagttgagtgtggtggcgatgtgctcggtgacgaagaaatacatgatccatcgtctcagcggcatctcgctgacatcgcccagagcttccaagcgctccatggcctcgtagaagtccacggcaaaattaaaaaactgggagtttcgcgcggacacggtcaactcctcttccagaagacggataagttcggcgatggtggtgcgcacctcgcgctcgaaagcccctgggatttcttcctcaatctcttcttcttccactaacatctcttcctcttcaggtggggctgcaggaggagggggaacgcggcgacgccggcggcgcacgggcagacggtcgatgaatctttcaatgacctctccgcggcggcggcgcatggtttcagtgacggcgcggccgttctcgcgcggtcgcagagtaaaaacaccgccgcgcatctccttaaagtggtgactgggaggttctccgtttgggagggagagggcgctgattatacattttattaattggcccgtagggactgcacgcagagatctgatcgtgtcaagatccacgggatctgaaaacctttcgacgaaagcgtctaaccagtcacagtcacaaggtaggctgagtacggcttcttgtgggcgggggtggttatgtgttcggtctgggtcttctgtttcttcttcatctcgggaaggtgagacgatgctgctggtgatgaaattaaagtaggcagttctaagacggcggatggtggcgaggagcaccaggtctttgggtccggcttgctggatacgcaggcgattggccattccccaagcattatcctgacatctagcaagatctttgtagtagtcttgcatgagccgttctacgggcacttcttcctcacccgttctgccatgcatacgtgtgagtccaaatccgcgcattggttgtaccagtgccaagtcagctacgactctttcggcgaggatggcttgctgtacttgggtaagggtggcttgaaagtcatcaaaatccacaaagcggtggtaagctcctgtattaatggtgtaagcacagttggccatgactgaccagttaactgtctggtgaccagggcgcacgagctcggtgtatttaaggcgcgaataggcgcgggtgtcaaagatgtaatcgttgcaggtgcgcaccagatactggtaccctataagaaaatgcggcggtggttggcggtagagaggccatcgttctgtagctggagcgccaggggcgaggtcttccaacataaggcggtgatagccgtagatgtacctggacatccaggtgattcctgcggcggtagtagaagcccgaggaaactcgcgtacgcggttccaaatgttgcgtagcggcatgaagtagttcattgtaggcacggtttgaccagtgaggcgcgcgcagtcattgatgctctatagacacggagaaaatgaaagcgttcagcgactcgactccgtagcctggaggaacgtgaacgggttgggtcgcggtgtaccccggttcgagacttgtactcgagccggccggagccgcggctaacgtggtattggcactcccgtctcgacccagcctacaaaaatccaggatacggaatcgagtcgttttgctggtttccgaatggcagggaagtgagtcctattttttttttttgccgctcagatgcatcccgtgctgcgacagatgcgcccccaacaacagcccccctcgcagcagcagcagcagcaatcacaaaaggctgtccctgcaactactgcaactgccgccgtgagcggtgcgggacagcccgcctatgatctggacttggaagagggcgaaggactggcacgtctaggtgcgccttcacccgagcggcatccgcgagttcaactgaaaaaagattctcgcgaggcgtatgtgccccaacagaacctatttagagacagaagcggcgaggagccggaggagatgcgagcttcccgctttaacgcgggtcgtgagctgcgtcacggtttggaccgaagacgagtgttgcgggacgaggatttcgaagttgatgaaatgacagggatcagtcctgccagggcacacgtggctgcagccaaccttgtatcggcttacgagcagacagtaaaggaagagcgtaacttccaaaagtcttttaataatcatgtgcgaaccctgattgcccgcgaagaagttacccttggtttgatgcatttgtgggatttgatggaagctatcattcagaaccctactagcaaacctctgaccgcccagctgtttctggtggtgcaacacagcagagacaatgaggctttcagagaggcgctgctgaacatcaccgaacccgaggggagatggttgtatgatcttatcaacattctacagagtatcatagtgcaggagcggagcctgggcctggccgagaaggtggctgccatcaattactcggttttgagcttgggaaaatattacgctcgcaaaatctacaagactccatacgttcccatagacaaggaggtgaagatagatgggttctacatgcgcatgacgctcaaggtcttgaccctgagcgatgatcttggggtgtatcgcaatgacagaatgcatcgcgcggttagcgccagcaggaggcgcgagttaagcgacagggaactgatgcacagtttgcaaagagctctgactggagctggaaccgagggtgagaattacttcgacatgggagctgacttgcagtggcagcctagtcgcagggctctgagcgccgcgacggcaggatgtgagcttccttacatagaagaggcggatgaaggcgaggaggaagagggcgagtacttggaagactgatggcacaacccgtgttttttgctagatggaacagcaagcaccggatcccgcaatgcgggcggcgctgcagagccagccgtccggcattaactcctcggacgattggacccaggccatgcaacgtatcatggcgttgacgactcgcaaccccgaagcctttagacagcaaccccaggccaaccgtctatcggccatcatggaagctgtagtgccttcccgctctaatcccactcatgagaaggtcctggccatcgtgaacgcgttggtggagaacaaagctattcgtccagatgaggccggactggtatacaacgctctcttagaacgcgtggctcgctacaacagtagcaatgtgcaaaccaatttggaccgtatgataacagatgtacgcgaagccgtgtctcagcgcgaaaggttccagcgtgatgccaacctgggttcgctggtggcgttaaatgctttcttgagtactcagcctgctaatgtgccgcgtggtcaacaggattatactaactttttaagtgctttgagactgatggtatcagaagtacctcagagcgaagtgtatcagtccggtcctgattacttctttcagactagcagacagggcttgcagacggtaaatctgagccaagcttttaaaaaccttaaaggtttgtggggagtgcatgccccggtaggagaaagagcaaccgtgtctagcttgttaactccgaactcccgcctattattactgttggtagctcctttcaccgacagcggtagcatcgaccgtaattcctatttgggttacctactaaacctgtatcgcgaagccatagggcaaagtcaggtggacgagcagacctatcaagaaattacccaagtcagtcgcgctttgggacaggaagacactggcagtttggaagccactctgaacttcttgcttaccaatcggtctcaaaagatccctcctcaatatgctcttactgcggaggaggagaggatccttagatatgtgcagcagagcgtgggattgtttctgatgcaagagggggcaactccgactgcagcactggacatgacagcgcgaaatatggagcccagcatgtatgccagtaaccgacctttcattaacaaactgctggactacttgcacagagctgccgctatgaactctgattatttcaccaatgccatcttaaacccgcactggctgcccccacctggtttctacacgggcgaatatgacatgcccgaccctaatgacggatttctgtgggacgacgtggacagcgatgttttttcacctctttctgatcatcgcacgtggaaaaaggaaggcggcgatagaatgcattcttctgcatcgctgtccggggtcatgggtgctaccgcggctgagcccgagtctgcaagtccttttcctagtctacccttttctctacacagtgtacgtagcagcgaagtgggtagaataagtcgcccgagtttaatgggcgaagaggagtatctaaacgattccttgctcagaccggcaagagaaaaaaatttcccaaacaatggaatagaaagtttggtggataaaatgagtagatggaagacttatgctcaggatcacagagacgagcctgggatcatggggattacaagtagagcgagccgtagacgccagcgccatgacagacagaggggtcttgtgtgggacgatgaggattcggccgatgatagcagcgtgctggacttgggtgggagaggaaggggcaacccgtttgctcatttgcgccctcgcttgggtggtatgttgtaaaaaaaaataaaaaaaaaactcaccaaggccatggcgacgagcgtacgttcgttcttctttattatctgtgtctagtataatgaggcgagtcgtgctaggcggagcggtggtgtatccggagggtcctcctccttcgtacgagagcgtgatgcagcagcagcaggcgacggcggtgatgcaatccccactggaggctccctttgtgcctccgcgatacctggcacctacggagggcagaaacagcattcgttattcggaactggcacctcagtacgataccaccaggttgtatctggtggacaacaagtcggcggacattgcttctctgaactatcagaatgaccacagcaacttcttgaccacggtggtgcaaaacaatgactttacccctacggaagccagcacccagaccattaactttgatgaacgatcgcggtggggcggtcagctaaagaccatcatgcatactaacatgccaaacgtgaacgagtatatgtttagtaacaagttcaaagcgcgtgtgatggtgtccagaaaacctcccgacggtgctgcagttggggatacttatgatcacaagcaggatattttgaaatatgagtggttcgagtttactttgccagaaggcaacttttcagttactatgactattgatttgatgaacaatgccatcatagataattacttgaaagtgggtagacagaatggagtgcttgaaagtgacattggtgttaagttcgacaccaggaacttcaagctgggatgggatcccgaaaccaagttgatcatgcctggagtgtatacgtatgaagccttccatcctgacattgtcttactgcctggctgcggagtggattttaccgagagtcgtttgagcaaccttcttggtatcagaaaaaaacagccatttcaagagggttttaagattttgtatgaagatttagaaggtggtaatattccggccctcttggatgtagatgcctatgagaacagtaagaaagaacaaaaagccaaaatagaagctgctacagctgctgcagaagctaaggcaaacatagttgccagcgactctacaagggttgctaacgctggagaggtcagaggagacaattttgcgccaacacctgttccgactgcagaatcattattggccgatgtgtctgaaggaacggacgtgaaactcactattcaacctgtagaaaaagatagtaagaatagaagctataatgtgttggaagacaaaatcaacacagcctatcgcagttggtatctttcgtacaattatggcgatcccgaaaaaggagtgcgttcctggacattgctcaccacctcagatgtcacctgcggagcagagcaggtctactggtcgcttccagacatgatgaaggatcctgtcactttccgctccactagacaagtcagtaactaccctgtggtgggtgcagagcttatgcccgtcttctcaaagagcttctacaacgaacaagctgtgtactcccagcagctccgccagtccacctcgcttacgcacgtcttcaaccgctttcctgagaaccagattttaatccgtccgccggcgcccaccattaccaccgtcagtgaaaacgttcctgctctcacagatcacgggaccctgccgttgcgcagcagtatccggggagtccaacgtgtgaccgttactgacgccagacgccgcacctgtccctacgtgtacaaggcactgggcatagtcgcaccgcgcgtcctttcaagccgcactttctaaaaaaaaaaaaaatgtccattcttatctcgcccagtaataacaccggttggggtctgcgcgctccaagcaagatgtacggaggcgcacgcaaacgttctacccaacatcctgtccgtgttcgcggacattttcgcgctccatggggcgccctcaagggccgcactcgcgttcgaaccaccgtcgatgatgtaatcgatcaggtggttgccgacgcccgtaattatactcctactgcgcctacatctactgtggatgcagttattgacagtgtagtggctgacgctcgcaactatgctcgacgtaagagccggcgaaggcgcattgccagacgccaccgagctaccactgccatgcgagccgcaagagctctgctacgaagagctagacgcgtggggcgaagagccatgcttagggcggccagacgtgcagcttcgggcgccagcgccggcaggtcccgcaggcaagcagccgctgtcgcagcggcgactattgccgacatggcccaatcgcgaagaggcaatgtatactgggtgcgtgacgctgccaccggtcaacgtgtacccgtgcgcacccgtccccctcgcacttagaagatactgagcagtctccgatgttgtgtcccagcggcgaggatgtccaagcgcaaatacaaggaagaaatgctgcaggttatcgcacctgaagtctacggccaaccgttgaaggatgaaaaaaaaccccgcaaaatcaagcgggttaaaaaggacaaaaaagaagaggaagatggcgatgatgggctggcggagtttgtgcgcgagtttgccccacggcgacgcgtgcaatggcgtgggcgcaaagttcgacatgtgttgagacctggaacttcggtggtctttacacccggcgagcgttcaagcgctacttttaagcgttcctatgatgaggtgtacggggatgatgatattcttgagcaggcggctgaccgattaggcgagtttgcttatggcaagcgtagtagaataacttccaaggatgagacagtgtcgatacccttggatcatggaaatcccacccctagtcttaaaccggtcactttgcagcaagtgttacccgtaactccgcgaacaggtgttaaacgcgaaggtgaagatttgtatcccactatgcaactgatggtacccaaacgccagaagttggaggacgttttggagaaagtaaaagtggatccagatattcaacctgaggttaaagtgagacccattaagcaggtagcgcctggtctgggggtacaaactgtagacattaagattcccactgaaagtatggaagtgcaaactgaacccgcaaagcctactgccacctccactgaagtgcaaacggatccatggatgcccatgcctattacaactgacgccgccggtcccactcgaagatcccgacgaaagtacggtccagcaagtctgttgatgcccaattatgttgtacacccatctattattcctactcctggttaccgaggcactcgctactatcgcagccgaaacagtacctcccgccgtcgccgcaagacacctgcaaatcgcagtcgtcgccgtagacgcacaagcaaaccgactcccggcgccctggtgcggcaagtgtaccgcaatggtagtgcggaacctttgacactgccgcgtgcgcgttaccatccgagtatcatcacttaatcaatgttgccgctgcctccttgcagatatggccctcacttgtcgccttcgcgttcccatcactggttaccgaggaagaaactcgcgccgtagaagagggatgttgggacgcggaatgcgacgctacaggcgacggcgtgctatccgcaagcaattgcggggtggttttttaccagccttaattccaattatcgctgctgcaattggcgcgataccaggcatagcttccgtggcggttcaggcctcgcaacgacattgacattggaaaaaaacgtataaataaaaaaaaaaaaatacaatggactctgacactcctggtcctgtgactatgttttcttagagatggaagacatcaatttttcatccttggctccgcgacacggcacgaagccgtacatgggcacctggagcgacatcggcacgagccaactgaacgggggcgccttcaattggagcagtatctggagcgggcttaaaaattttggctcaaccataaaaacatacgggaacaaagcttggaacagcagtacaggacaggcgcttagaaataaacttaaagaccagaacttccaacaaaaagtagtcgatgggatagcttccggcatcaatggagtggtagatttggctaaccaggctgtgcagaaaaagataaacagtcgtttggacccgccgccagcaaccccaggtgaaatgcaagtggaggaagaaattcctccgccagaaaaacgaggcgacaagcgtccgcgtcccgatttggaagagacgctggtgacgcgcgtagatgaaccgccttcttatgaggaagcaacgaagcttggaatgcccaccactagaccgatagccccaatggccaccggggtgatgaaaccttctcagttgcatcgacccgtcaccttggatttgccccctccccctgctgctactgctgtacccgcttctaagcctgtcgctgccccgaaaccagtcgccgtagccaggtcacgtcccgggggcgctcctcgtccaaatgcgcactggcaaaatactctgaacagcatcgtgggtctaggcgtgcaaagtgtaaaacgccgtcgctgcttttaattaaatatggagtagcgcttaacttgcctatctgtgtatatgtgtcattacacgccgtcacagcagcagaggaaaaaaggaagaggtcgtgcgtcgacgctgagttactttcaagatggccaccccatcgatgctgccccaatgggcatacatgcacatcgccggacaggatgcttcggagtacctgagtccgggtctggtgcagttcgcccgcgccacagacacctacttcaatctgggaaataagtttagaaatcccaccgtagcgccgacccacgatgtgaccaccgaccgtagccagcggctcatgttgcgcttcgtgcccgttgaccgggaggacaatacatactcttacaaagtgcggtacaccctggccgtgggcgacaacagagtgctggatatggccagcacgttctttgacattaggggtgtgttggacagaggtcccagtttcaaaccctattctggtacggcttacaactccctggctcctaaaggcgctccaaatacatctcagtggattgcagaaggtgtaaaaaatacaactggtgaggaacacgtaacagaagaggaaaccaatactactacttacacttttggcaatgctcctgtaaaagctgaagctgaaattacaaaagaaggactcccagtaggtttggaagtttcagatgaagaaagtaaaccgatttatgctgataaaacatatcagccagaacctcagctgggagatgaaacttggactgaccttgatggaaaaaccgaaaagtatggaggcagggctctcaaacccgatactaagatgaaaccatgctacgggtcctttgccaaacctactaatgtgaaaggcggtcaggcaaaacaaaaaacaacggagcagccaaatcagaaagtcgaatatgatatcgacatggagttttttgatgcggcatcgcagaaaacaaacttaagtcctaaaattgtcatgtatgcagaaaatgtaaatttggaaactccagacactcatgtagtgtacaaacctggaacagaagacacaagttccgaagctaatttgggacaacaatctatgcccaacagacccaactacattggcttcagagataactttattggacttatgtactataacagtactggtaacatgggggtgctggctggtcaagcgtctcagttaaatgcagtggttgacttgcaggacagaaacacagaactttcttaccaactcttgcttgactctctgggcgacagaaccagatactttagcatgtggaatcaggctgtggacagttatgatcctgatgtacgtgttattgaaaatcatggtgtggaagatgaacttcccaactactgttttccactggacggcataggtgttccaacaaccagttacaaatcaatagttccaaatggagacaatgcgcctaattggaaggaacctgaagtaaatggaacaagtgagatcggacagggtaatttgtttgccatggaaattaaccttcaagccaatctatggcgaagtttcctttattccaatgtggctctatatctcccagactcgtacaaatacaccccgtccaatgtcactcttccagaaaacaaaaacacctacgactacatgaacgggcgggtggtgccgccatctctagtagacacctatgtgaacattggtgccaggtggtctctggatgccatggacaatgtcaacccattcaaccaccaccgtaacgctggcttgcgttaccgatccatgcttctgggtaacggacgttatgtgcctttccacatacaagtgcctcaaaaattcttcgctgttaaaaacctgctgcttctcccaggctcctacacttatgagtggaactttaggaaggatgtgaacatggttctacagagttccctcggtaacgacctgcgggtagatggcgccagcatcagtttcacgagcatcaacctctatgctacttttttccccatggctcacaacaccgcttccacccttgaagccatgctgcggaatgacaccaatgatcagtcattcaacgactacctatctgcagctaacatgctctaccccattcctgccaatgcaaccaatattcccatttccattccttctcgcaactgggcggctttcagaggctggtcatttaccagactgaaaaccaaagaaactccctctttggggtctggatttgacccctactttgtctattctggttctattccctacctggatggtaccttctacctgaaccacacttttaagaaggtttccatcatgtttgactcttcagtgagctggcctggaaatgacaggttactatctcctaacgaatttgaaataaagcgcactgtggatggcgaaggctacaacgtagcccaatgcaacatgaccaaagactggttcttggtacagatgctcgccaactacaacatcggctatcagggcttctacattccagaaggatacaaagatcgcatgtattcatttttcagaaacttccagcccatgagcaggcaggtggttgatgaggtcaattacaaagacttcaaggccgtcgccataccctaccaacacaacaactctggctttgtgggttacatggctccgaccatgcgccaaggtcaaccctatcccgctaactatccctatccactcattggaacaactgccgtaaatagtgttacgcagaaaaagttcttgtgtgacagaaccatgtggcgcataccgttctcgagcaacttcatgtctatgggggcccttacagacttgggacagaatatgctctatgccaactcagctcatgctctggacatgacctttgaggtggatcccatggatgagcccaccctgctttatcttctcttcgaagttttcgacgtggtcagagtgcatcagccacaccgcggcatcatcgaggcagtctacctgcgtacaccgttctcggccggtaacgctaccacgtaagaagcttcttgcttcttgcaaatagcagctgcaaccatggcctgcggatcccaaaacggctccagcgagcaagagctcagagccattgtccaagacctgggttgcggaccctattttttgggaacctacgataagcgcttcccggggttcatggcccccgataagctcgcctgtgccattgtaaatacggccggacgtgagacggggggagagcactggttggctttcggttggaacccacgttctaacacctgctacctttttgatccttttggattctcggatgatcgtctcaaacagatttaccagtttgaatatgagggtctcctgcgccgcagcgctcttgctaccaaggaccgctgtattacgctggaaaaatctacccagaccgtgcagggtccccgttctgccgcctgcggacttttctgctgcatgttccttcacgcctttgtgcactggcctgaccgtcccatggacggaaaccccaccatgaaattgctaactggagtgccaaacaacatgcttcattctcctaaagtccagcccaccctgtgtgacaatcaaaaagcactctaccattttcttaatacccattcgccttattttcgctcccatcgtacacacatcgaaagggccactgcgttcgaccgtatggatgttcaataatgactcatgtaaacaacgtgttcaataaacatcactttatttttttacatgtatcaaggctctgcattacttatttatttacaagtcgaatgggttctgacgagaatcagaatgacccgcaggcagtgatacgttgcggaactgatacttgggttgccacttgaattcgggaatcaccaacttgggaaccggtatatcgggcaggatgtcactccacagctttctggtcagctgcaaagctccaagcaggtcaggagccgaaatcttgaaatcacaattaggaccagtgctttgagcgcgagagttgcggtacaccggattgcagcactgaaacaccatcagcgacggatgtctcacgcttgccagcacggtgggatctgcaatcatgcccacatccagatcttcagcattggcaatgctgaacggggtcatcttgcaggtctgcctacccatggcgggcacccaattaggcttgtggttgcaatcgcagtgcagggggatcagtatcatcttggcctgatcctgtctgattcctggatacacggctctcatgaaagcatcatattgcttgaaagcctgctgggctttactaccctcggtataaaacatcccgcaggacctgctcgaaaactggttagctgcacagccggcatcattcacacagcagcgggcgtcattgttagctatttgcaccacacttctgccccagcggttttgggtgattttggttcgctcgggattctcctttaaggctcgttgtccgttctcgctggccacatccatctcgataatctgctccttctgaatcataatattgccatgcaggcacttcagcttgccctcataatcattgcagccatgaggccacaacgcacagcctgtacattcccaattatggtgggcgatctgagaaaaagaatgtatcattccctgcagaaatcttcccatcatcgtgctcagtgtcttgtgactagtgaaagttaactggatgcctcggtgctcctcgtttacgtactggtgacagatgcgcttgtattgttcgtgttgctcaggcattagtttaaaagaggttctaagttcgttatccagcctgtacttctccatcagcagacacatcacttccatgcctttctcccaagcagacaccaggggcaagctaatcggattcttaacagtgcaggcagcagctcctttagccagagggtcatctttagcgatcttctcaatgcttcttttgccatccttctcaacgatgcgcacgggcgggtagctgaaacccactgctacaagttgcgcctcttctctttcttcttcgctgtcttgactgatgtcttgcatggggatatgtttggtcttccttggcttctttttggggggtatcggaggaggaggactgtcgctccgttccggagacagggaggattgtgacgtttcgctcaccattaccaactgactgtcggtagaagaacctgaccccacacggcgacaggtgtttctcttcgggggcagaggtggaggcgattgcgaagggctgcggtccgacctggaaggcggatgactggcagaaccccttccgcgttcgggggtgtgctccctgtggcggtcgcttaactgatttccttcgcggctggccattgtgttctcctaggcagagaaacaacagacatggaaactcagccattgctgtcaacatcgccacgagtgccatcacatctcgtcctcagcgacgaggaaaaggagcagagcttaagcattccaccgcccagtcctgccaccacctctaccctagaagataaggaggtcgacgcatctcatgacatgcagaataaaaaagcgaaagagtctgagacagacatcgagcaagacccgggctatgtgacaccggtggaacacgaggaagagttgaaacgctttctagagagagaggatgaaaactgcccaaaacaacgagcagataactatcaccaagatgctggaaatagggatcagaacaccgactacctcatagggcttgacggggaagacgcgctccttaaacatctagcaagacagtcgctcatagtcaaggatgcattattggacagaactgaagtgcccatcagtgtggaagagctcagccgcgcctacgagcttaacctcttttcacctcgtactccccccaaacgtcagccaaacggcacctgcgagccaaatcctcgcttaaacttttatccagcttttgctgtgccagaagtactggctacctatcacatcttttttaaaaatcaaaaaattccagtctcctgccgcgctaatcgcacccgcgccgatgccctactcaatctgggacctggttcacgcttacctgatatagcttccttggaagaggttccaaagatcttcgagggtctgggcaataatgagactcgggccgcaaatgctctgcaaaagggagaaaatggcatggatgagcatcacagcgttctggtggaattggaaggcgataatgccagactcgcagtactcaagcgaagcatcgaggtcacacacttcgcatatcccgctgtcaacctgccccctaaagtcatgacggcggtcatggaccagttactcattaagcgcgcaagtcccctttcagaagacatgcatgacccagatgcctgtgatgagggtaaaccagtggtcagtgatgagcagctaacccgatggctgggcaccgactctcccagggatttggaagagcgtcgcaagcttatgatggccgtggtgctggttaccgtagaactagagtgtctccgacgtttctttaccgattcagaaaccttgcgcaaactcgaagagaatctgcactacacttttagacacggctttgtgcggcaggcatgcaagatatctaacgtggaactcaccaacctggtttcctacatgggtattctgcatgagaatcgcctaggacaaagcgtgctgcacagcaccctgaagggggaagcccgccgtgattacatccgcgattgtgtctatctgtacctgtgccacacgtggcaaaccggcatgggtgtatggcagcaatgtttagaagaacagaacttgaaagagcttgacaagctcttacagaaatctcttaaggttctgtggacagggttcgacgagcgcaccgtcgcttccgacctggcagacctcatcttcccagagcgtctcagggttactttgcgaaacggattgcctgactttatgagccagagcatgcttaacaattttcgctctttcatcctggaacgctccggtatcctgcccgccacctgctgcgcactgccctccgactttgtgcctctcacctaccgcgagtgccccccgccgctatggagtcactgctacctgttccgtctggccaactatctctcctaccactcggatgtgatcgaggatgtgagcggagacggcttgctggagtgtcactgccgctgcaatctgtgcacgccccaccggtccctagcttgcaacccccagttgatgagcgaaacccagataataggcacctttgaattgcaaggccccagcagccaaggcgatgggtcttctcctgggcaaagtttaaaactgaccccgggactgtggacctccgcctacttgcgcaagtttgctccggaagattaccacccctatgaaatcaagttctatgaggaccaatcacagcctccaaaggccgaactttcggcctgcgtcatcacccagggggcaattctggcccaattgcaagccatccaaaaatcccgccaagaatttctactgaaaaagggtaagggggtctaccttgacccccagaccggcgaggaactcaacacaaggttccctcaggatgtcccaacgacgagaaaacaagaagttgaaggtgcagccgccgcccccagaagatatggaggaagattgggacagtcaggcagaggaggcggaggaggacagtctggaggacagtctggaggaagacagtttggaggaggaaaacgaggaggcagaggaggtggaagaagtaaccgccgacaaacagttatcctcggctgcggagacaagcaacagcgctaccatctccgctccgagtcgaggaacccggcggcgtcccagcagtagatgggacgagaccggacgcttcccgaacccaaccagcgcttccaagaccggtaagaaggatcggcagggatacaagtcctggcgggggcataagaatgccatcatctcctgcttgcatgagtgcgggggcaacatatccttcacgcggcgctacttgctattccaccatggggtgaactttccgcgcaatgttttgcattactaccgtcacctccacagcccctactatagccagcaaatcccggcagtctcgacagataaagacagcggcggcgacctccaacagaaaaccagcagcggcagttagaaaatacacaacaagtgcagcaacaggaggattaaagattacagccaacgagccagcgcaaacccgagagttaagaaatcggatctttccaaccctgtatgccatcttccagcagagtcggggtcaagagcaggaactgaaaataaaaaaccgatctctgcgttcgctcaccagaagttgtttgtatcacaagagcgaagatcaacttcagcgcactctcgaggacgccgaggctctcttcaacaagtactgcgcgctgactcttaaagagtaggcagcgaccgcgcttattcaaaaaaggcgggaattacatcatcctcgacatgagtaaagaaattcccacgccttacatgtggagttatcaaccccaaatgggattggcggcaggcgcctcccaggactactccacccgcatgaattggctcagcgccgggccttctatgatttctcgagttaatgatatacgcgcctaccgaaaccaaatacttttggaacagtcagctcttaccaccacgccccgccaacaccttaatcccagaaattggcccgccgccctagtgtaccaggaaagtcccgctcccaccactgtattacttcctcgagacgcccaggccgaagtccaaatgactaatgcaggtgcgcagttagctggcggctccaccctatgtcgtcacaggcctcggcataatataaaacgcctgatgatcagaggccgaggtatccagctcaacgacgagtcggtgagctctccgcttggtctacgaccagacggaatctttcagattgccggctgcgggagatcttccttcacccctcgtcaggctgttctgactttggaaagttcgtcttcgcaaccccgctcgggcggaatcgggaccgttcaatttgtggaggagtttactccctctgtctacttcaaccccttctccggatctcctgggcattacccggacgagttcataccgaacttcgacgcgattagcgagtcagtggacggctacgattgatgtctggtgacgcggctgagctatctcggctgcgacatctagaccactgccgccgctttcgctgctttgcccgggaactcattgagttcatctacttcgaactccccaaggatcaccctcaaggtccggcccacggagtgcggatttctatcgaaggcaaaatagactctcgcctgcaacgaattttctcccagcggcccgtgctgatcgagcgagaccagggaaacaccacggtttccatctactgcatttgtaatcaccccggattgcatgaaagcctttgctgtcttatgtgtactgagtttaataaaaactgaattaagactctcctacggactgccgcttcttcaacccggattttacaaccagaagaacgaaacttttcctgtcgtccaggactctgttaacttcacctttcctactcacaaactagaagctcaacgactacaccgcttttccagaagcattttccctactaatactactttcaaaaccggaggtgagctccaaggtcttcctacagaaaacccttgggtggaagcgggccttgtagtgctaggaattcttgcgggtgggcttgtgattattctttgctacctatacacaccttgcttcactttcttagtggtgttgtggtattggtttaaaaaatggggcccatactagtcttgcttgttttactttcgcttttggaaccgggttctgccaattacgatccatgtctagacttcgacccagaaaactgcacacttacttttgcacccgacacaagccgcatctgtggagttcatcgcctctcttacgaacttggcccccaacgacaaaaatttacctgcatggtgggaatcaaccccatagttatcacccagcaaagtggagatactaagggttgcattcactgctcctgcgattccatcgagtgcacctacaccctgctgaagaccctatgcggcctaagagacctgctaccaatgaattaaaaaatgattaataaaaaatcacttacttgaaatcagcaataaggtctctgttgaaattttctcccagcagcacctcacttccctcttcccaactctggtattctaaaccccgttcagcggcatactttctccatactttaaaggggatgtcaaattttagctcctctcctgtacccacaatcttcatgtctttcttcccagatgaccaagagagtccggctcagtgactccttcaaccctgtctacccctatgaagatgaaagcacctcccaacacccctttataaacccagggtttatttccccaaatggcttcacacaaagcccaaacggagttcttactttaaaatgtttaaccccactaacaaccacaggcggatctctacagctaaaagtgggagggggacttacagtggatgacaccaacggttttttgaaagaaaacataagtgccaccacaccactcgttaagactggtcactctataggtttaccactaggagccggattgggaacgaatgaaaataaactttgtatcaaattaggacaaggacttacattcaattcaaacaacatttgcattgatgacaatattaacaccttatggacaggagtcaaccccaccgaagccaactgtcaaatcatgaactccagtgaatctaatgattgcaaattaattctaacactagttaaaactggagcactagtcactgcatttgtttatgttataggagtatctaacaattttaatatgctaactacacacagaaatataaattttactgcagagctgtttttcgattctactggtaatttactaactagactctcatccctcaaaactccacttaatcataaatcaggacaaaacatggctactggtgccattactaatgctaaaggtttcatgcccagcacgactgcctatcctttcaatgataattctagagaaaaagaaaactacatttacggaacttgttactacacagctagtgatcgcactgcttttcccattgacatatctgtcatgcttaaccgaagagcaataaatgacgagacatcatattgtattcgtataacttggtcctggaacacaggagatgccccagaggtgcaaacctctgctacaaccctagtcacctccccatttaccttttactacatcagagaagacgactgacaaataaagtttgcgatcgccaggcccaccatgtgtcaccagcagttggtcatctcttggttttccctggtttttctggcatctcccctcgtggccatatgggaactgaagaaagatgtttatgtcgtagaattggattggtatccggatgcccctggagaaatggtggtcctcacctgtgacacccctgaagaagatggtatcacctggaccttggaccagagcagtgaggtcttaggctctggcaaaaccctgaccatccaagtcaaagagtttggagatgctggccagtacacctgtcacaaaggaggcgaggttctaagccattcgctcctgctgcttcacaaaaaggaagatggaatttggtccactgatattttaaaggaccagaaagaacccaaaaataagacctttctaagatgcgaggccaagaattattctggacgtttcacctgctggtggctgacgacaatcagtactgatttgacattcagtgtcaaaagcagcagaggctcttctgacccccaaggggtgacgtgcggagctgctacactctctgcagagagagtcagaggggacaacaaggagtatgagtactcagtggagtgccaggaggacagtgcctgcccagctgctgaggagagtctgcccattgaggtcatggtggatgccgttcacaagctcaagtatgaaaactacaccagcagcttcttcatcagggacatcatcaaacctgacccacccaagaacttgcagctgaagccattaaagaattctcggcaggtggaggtcagctgggagtaccctgacacctggagtactccacattcctacttctccctgacattctgcgttcaggtccagggcaagagcaagagagaaaagaaagatagagtcttcacggacaagacctcagccacggtcatctgccgcaaaaatgccagcattagcgtgcgggcccaggaccgctactatagctcatcttggagcgaatgggcatctgtgccctgcagtggagggggcggcagcgggggaggcggcagcggcggcgggggatcgagaaacctccccgtggccactccagacccaggaatgttcccatgccttcaccactcccaaaacctgctgagggccgtcagcaacatgctccagaaggccagacaaactctagaattttacccttgcacttctgaagagattgatcatgaagatatcacaaaagataaaaccagcacagtggaggcctgtttaccattggaattaaccaagaatgagagttgcctaaattccagagagacctctttcataactaatgggagttgcctggcctccagaaagacctcttttatgatggccctgtgccttagtagtatttatgaagacttgaagatgtaccaggtggagttcaagaccatgaatgcaaagcttctgatggatcctaagaggcagatctttctagatcaaaacatgctggcagttattgatgagctgatgcaggccctgaatttcaacagtgagactgtgccacaaaaatcctcccttgaagaaccggatttttataaaactaaaatcaagctctgcatacttcttcatgctttcagaattcgggcagtgactattgatagagtgatgagctatctgaatgcttcctaagctagcttgactgactgagatacagcgtaccttcagctcacagacatgataagatacattgatgagtttggacaaaccacaactagaatgcagtgaaaaaaatgctttatttgtgaaatttgtgatgctattgctttatttgtaaccattataagctgcaataaacaagttaacaacaacaattgcattcattttatgtttcaggttcagggggaggtgtgggaggttttttaaagcaagtaaaacctctacaaatgtggtagtcgtcagctatcctgcaggaacttgtttatttgaaaatcaattcacaaaatccgagtagttattttgcctcccccttcccatttaacagaatacaccaatctctccccacgcacagctttaaacatttggataccattagatatagacatggttttagattccacattccaaacagtttcagagcgagccaatctggggtcagtgatagataaaaatccatcgggatagtcttttaaagcgctttcacagtccaactgctgcggatgcgactccggagtctggatcacggtcatctggaagaagaacgatgggaatcataatccgaaaacggtatcggacgattgtgtctcatcaaacccacaagcagccgctgtctgcgtcgctccgtgcgactgctgtttatgggatcagggtccacagtgtcctgaagcatgattttaatagcccttaacatcaactttctggtgcgatgcgcgcagcaacgcattctgatttcactcaaatctttgcagtaggtacaacacattattacaatattgtttaataaaccataattaaaagcgctccagccaaaactcatatctgatataatcgcccctgcatgaccatcataccaaagtttaatataaattaaatgacgttccctcaaaaacacactacccacatacatgatctcttttggcatgtgcatattaacaatctgtctgtaccatggacaacgttggttaatcatgcaacccaatataaccttccggaaccacactgccaacaccgctcccccagccatgcattgaagtgaaccctgctgattacaatgacaatgaagaacccaattctctcgaccgtgaatcacttgagaatgaaaaatatctatagtggcacaacatagacataaatgcatgcatcttctcataatttttaactcctcaggatttagaaacatatcccagggaataggaagctcttgcagaacagtaaagctggcagaacaaggaagaccacgaacacaacttacactatgcatagtcatagtatcacaatctggcaacagcgggtggtcttcagtcatagaagctcgggtttcattttcctcacaacgtggtaactgggctctggtgtaagggtgatgtctggcgcatgatgtcgagcgtgcgcgcaaccttgtcataatggagttgcttcctgacattctcgtattttgtatagcaaaacgcggccctggcagaacacactcttcttcgccttctatcctgccgcttagcgtgttccgtgtgatagttcaagtacaaccacactcttaagttggtcaaaagaatgctggcttcagttgtaatcaaaactccatcgcatctaatcgttctgaggaaatcatccaagcaatgcaactggattgtgtttcaagcaggagaggagagggaagagacggaagaaccatgttaatttttattccaaacgatctcgcagtacttcaaattgtagatcgcgcagatggcatctctcgcccccactgtgttggtgaaaaagcacagctagatcaaaagaaatgcgattttcaaggtgctcaacggtggcttccagcaaagcctccacgcgcacatccaagaacaaaagaataccaaaagaaggagcattttctaactcctcaatcatcatattacattcctgcaccattcccagataattttcagctttccagccttgaattattcgtgtcagttcttgtggtaaatccaatccacacattacaaacaggtcccggagggcgccctccaccaccattcttaaacacaccctcataatgacaaaatatcttgctcctgtgtcacctgtagcgaattgagaatggcaacatcaattgacatgcccttggctctaagttcttctttaagttctagttgtaaaaactctctcatattatcaccaaactgcttagccagaagccccccgggaacaagagcaggggacgctacagtgcagtacaagcgcagacctccccaattggctccagcaaaaacaagattggaataagcatattgggaaccgccagtaatatcatcgaagttgctggaaatataatcaggcagagtttcttgtaaaaattgaataaaagaaaaatttgccaaaaaaacattcaaaacctctgggatgcaaatgcaataggttaccgcgctgcgctccaacattgttagttttgaattagtctgcaaaaataaaaaaaaaaacaagcgtcatatcatagtagcctgacgaacagatggataaatcagtctttccatcacaagacaagccacagggtctccagctcgaccctcgtaaaacctgtcatcatgattaaacaacagcaccgaaagttcctcgcggtgaccagcatgaataattcttgatgaagcatacaatccagacatgttagcatcagttaacgagaaaaaacagccaacatagcctttgggtataattatgcttaatcgtaagtatagcaaagccacccctcgcggatacaaagtaaaaggcacaggagaataaaaaatataattatttctctgctgctgttcaggcaacgtcgcccccggtccctctaaatacacatacaaagcctcatcagccatggcttaccagacaaagtacagcgggcacacaaagcacaagctctaaagtgactctccaacctctccacaatatatatatacacaagccctaaactgacgtaatgggagtaaagtgtaaaaaatcccgccaaacccaacacacaccccgaaactgcgtcaccagggaaaagtacagtttcacttccgcaatcccaacaggcgtaacttcctctttctcacggtacgtgatatcccactaacttgcaacgtcattttcccacggtcgcaccgccccttttagccgttaaccccacagccaatcaccacacgatccacactttttaaaatcacctcatttacatattggcaccattccatctataaggtatattatatagataga

SEQ ID NO: 76 - DNA, 34249 bp, Artificial Sequence
  Genome sequence of NG-703 virus
tctatctatataatataccttatagatggaatggtgccaatatgtaaatgaggtgattttaaaaagtgtggatcgtgtggtgattggctgtggggttaacggctaaaaggggcggtgcgaccgtgggaaaatgacgttttgtgggggtggagtttttttgcaagttgtcgcgggaaatgtgacgcataaaaaggcttttttctcacggaactacttagttttcccacggtatttaacaggaaatgaggtagttttgaccggatgcaagtgaaaattgttgattttcgcgcgaaaactgaatgaggaagtgtttttctgaataatgtggtatttatggcagggtggagtatttgttcagggccaggtagactttgacccattacgtggaggtttcgattaccgtgttttttacctgaatttccgcgtaccgtgtcaaagtcttctgtttttacgtaggtgtcagctgatcgctagggtatttatacctcagggtttgtgtcaagaggccactcttgagtgccagcgagaagagttttctcctctgcgccggcagtttaataataaaaaaatgagagatttgcgatttctgcctcaggaaataatctctgctgagactggaaatgaaatattggagcttgtggtgcacgccctgatgggagacgatccggagccacctgtgcagctttttgagcctcctacgcttcaggaactgtatgatttagaggtagagggatcggaggattctaatgaggaagctgtaaatggcttttttaccgattctatgcttttagctgctaatgaagggttagaattagatccgcctttggacacttttgatactccaggggtaattgtggaaagcggtacaggtgtaagaaaattacctgatttgagttccgtggactgtgatttgcactgctatgaagacgggtttcctccgagtgatgaggaggaccatgaaaaggagcagtccatgcagactgcagcgggtgagggagtgaaggctgccaatgttggttttcagttggattgcccggagcttcctggacatggctgtaagtcttgtgaatttcacaggaaaaatactggagtaaaggaactgttatgttcgctttgttatatgagaacgcactgccactttatttacagtaagtgtgtttaagttaaaatttaaaggaatatgctgtttttcacatgtatattgagtgtgagttttgtgcttcttattataggtcctgtgtctgatgctgatgaatcaccatctcctgattctactacctcacctcctgagattcaagcacctgttcctgtggacgtgcgcaagcccattcctgtgaagcttaagcctgggaaacgtccagcagtggaaaaacttgaggacttgttacagggtggggacggacctttggacttgagtacacggaaacgtccaagacaataagtgttccatatccgtgtttacttaaggtgacgtcaatatttgtgtgacagtgcaatgtaataaaaatatgttaactgttcactggtttttattgctttttgggcggggactcaggtatataagtagaagcagacctgtgtggttagctcataggagctggctttcatccatggaggtttgggccattttggaagaccttaggaagactaggcaactgttagagaacgcttcggacggagtctccggtttttggagattctggttcgctagtgaattagctagggtagtttttaggataaaacaggactataaacaagaatttgaaaagttgttggtagattgcccaggactttttgaagctcttaatttgggccatcaggttcactttaaagaaaaagttttatcagttttagacttttcaaccccaggtagaactgctgctgctgtggcttttcttacttttatattagataaatggatcccgcagactcatttcagcaggggatacgttttggatttcatagccacagcattgtggagaacatggaaggttcgcaagatgaggacaatcttaggttactggccagtgcagcctttgggtgtagcgggaatcctgaggcatccaccggtcatgccagcggttctggaggaggaacagcaagaggacaacccgagagccggcctggaccctccagtggaggaggcggagtagctgacttgtctcctgaactgcaacgggtgcttactggatctacgtccactggacgggataggggcgttaagagggagagggcatctagtggtactgatgctagatctgagttggctttaagtttaatgagtcgcagacgtcctgaaaccatttggtggcatgaggttcagaaagagggaagggatgaagtttctgtattgcaggagaaatattcactggaacaggtgaaaacatgttggttggagcctgaggatgattgggaggtggccattaaaaattatgccaagatagctttgaggcctgataaacagtataagattactagacggattaatatccggaatgcttgttacatatctggaaatggggctgaggtggtaatagatactcaagacaaggcagttattagatgctgcatgatggatatgtggcctggggtagtcggtatggaagcagtaacttttgtaaatgttaagtttaggggagatggttataatggaatagtgtttatggccaataccaaacttatattgcatggttgtagcttttttggtttcaacaatacctgtgtagatgcctggggacaggttagtgtacggggatgtagtttctatgcgtgttggattgccacagctggcagaaccaagagtcaattgtctctgaagaaatgcatatttcaaagatgtaacctgggcattctgaatgaaggcgaagcaagggtccgccactgcgcttctacagatactggatgttttattttgattaagggaaatgccagcgtaaagcataacatgatttgcggtgcttccgatgagaggccttatcaaatgctcacttgtgctggtgggcattgtaatatgctggctactgtgcatattgtttcccatcaacgcaaaaaatggcctgtttttgatcacaatgtgatgacgaagtgtaccatgcatgcaggtgggcgtagaggaatgtttatgccttaccagtgtaacatgaatcatgtgaaagtgttgttggaaccagatgccttttccagaatgagcctaacaggaatttttgacatgaacatgcaaatctggaagatcctgaggtatgatgatacgagatcgagggtacgcgcatgcgaatgcggaggcaagcatgccaggttccagccggtgtgtgtagatgtgactgaagatctcagaccggatcatttggttattgcccgcactggagcagagttcggatccagtggagaagaaactgactaaggtgagtattgggaaaactttggggtgggattttcagatggacagattgagtaaaaatttgttttttctgtcttgcagctgtcatgagtggaaacgcttcttttaaggggggagtcttcagcccttatctgacagggcgtctcccatcctgggcaggagttcgtcagaatgttatgggatctactgtggatggaagacccgtccaacccgccaattcttcaacgctgacctatgctactttaagttcttcacctttggacgcagctgcagctgccgccgccgcttctgttgccgctaacactgtgcttggaatgggttactatggaagcatcatggctaattccacttcctctaataacccttctaccctgactcaggacaagttacttgtccttttggcccagctggaggctttgacccaacgtctgggtgaactttctcagcaggtggtcgagttgcgagtacaaactgagtctgctgtcggcacggcaaagtctaaataaaaaaatcccagaatcaatgaataaataaacaagcttgttgttgatttaaaatcaagtgtttttatttcatttttcgcgcacggtatgccctagaccaccgatctctatcattgagaactcggtggattttttccaggatcctatagaggtgggattgaatgtttagatacatgggcattaggccgtctttggggtggagatagctccattgaagggattcatgctccggggtagtgttgtaaatcacccagtcataacaaggtcgcagtgcatggtgttgcacaatatcttttagaagtaggctgattgccacagataagcccttggtgtaggtgtttacaaaccggttgagctgggatgggtgcattcggggtgaaattatgtgcattttggattggatttttaagttggcaatattgccgccaagatcccgtcttgggttcatgttatgaaggaccaccaagacggtgtatccggtacatttaggaaatttatcgtgcagcttggatggaaaagcgtggaaaaatttggagacacccttgtgtcctccaagattttccatgcactcatccatgataatagcaatggggccgtgggcagcggcgcgggcaaacacgttccgtgggtctgacacatcatagttatgttcctgagttaaatcatcataagccattttaatgaatttggggcggagagtaccagattggggtatgaatgttccttcgggccccggagcatagttcccctcacagatttgcatttcccaagctttcagttccgagggtggaatcatgtccacctggggggctatgaaaaacaccgtttctggggcgggggtgattaattgtgatgatagcaaatttctgagcaattgagatttgccacatccggtggggccataaatgattccgattacgggttgcaggtggtagtttagggaacggcaactgccgtcttctcgaagcaagggggccacctcgttcatcatttcccttacatgcatattttcccgcaccaaatccattaggaggcgctctcctcctagtgatagaagttcttgtagtgaggaaaagtttttcagcggtttcagaccgtcagccatgggcattttggagagagtttgctgcaaaagttctagtctgttccacagttcagtgatgtgttctatggcatctcgatccagcagacctcctcgtttcgcgggtttggacggctcctggaatagggtatgagacgatgggcgtccagcgctgccagggttcggtccttccagggtctcagtgttcgagtcagggttgtttccgtcacagtgaaggggtgtgcgcctgcttgggcgcttgccagggtgcgcttcagactcatcctgctggtcgaaaacttctgtcgcttggcgccctgtatgtcggccaagtagcagtttaccatgagttcgtagttgagcgcctcggctgcgtggcctttggcgcggagcttacctttggaagttttcttgcataccgggcagtataggcatttcagcgcatacaacttgggcgcaaggaaaacggattctggggagtatgcatctgcgccgcaggaggcgcaaacagtttcacattccaccagccaggttaaatccggttcattggggtcaaaaacaagttttccgccatattttttgatgcgtttcttacctttggtctccatgagttcgtgtcctcgttgagtgacaaacaggctgtccgtgtccccgtagactgattttacaggcctcttctccagtggagtgcctcggtcttcttcgtacaggaactctgaccactctgatacaaaggcgcgcgtccaggccagcacaaaggaggctatgtgggaggggtagcgatcgttgtcaaccagggggtccaccttttccaaagtatgcaaacacatgtcaccctcttcaacatccaggaatgtgattggcttgtaggtgtatttcacgtgacctggggtccccgctgggggggtataaaagggggcggttctttgctcttcctcactgtcttccggatcgctgtccaggaacgtcagctgttggggtaggtattccctctcgaaggcgggcatgacctctgcactcaggttgtcagtttctaagaacgaggaggatttgatattgacagtgccggttgagatgcctttcatgaggttttcgtccatctggtcagaaaacacaatttttttattgtcaagtttggtggcaaatgatccatacagggcgttggataaaagtttggcaatggatcgcatggtttggttcttttccttgtccgcgcgctctttggcggcgatgttgagttggacatactcgcgtgccaggcacttccattcggggaagatagttgttaattcatctggcacgattctcacttgccaccctcgattatgcaaggtaattaaatccacactggtggccacctcgcctcgaaggggttcattggtccaacagagcctacctcctttcctagaacagaaagggggaagtgggtctagcataagttcatcgggagggtctgcatccatggtaaagattcccggaagtaaatccttatcaaaatagctgatgggagtggggtcatctaaggccatttgccattctcgagctgccagtgcgcgctcatatgggttaaggggactgccccatggcatgggatgggtgagtgcagaggcatacatgccacagatgtcatagacgtagatgggatcctcaaagatgcctatgtaggttggatagcatcgcccccctctgatacttgctcgcacatagtcatatagttcatgtgatggcgctagcagccccggacccaagttggtgcgattgggtttttctgttctgtagacgatctggcgaaagatggcgtgagaattggaagagatggtgggtctttgaaaaatgttgaaatgggcatgaggtagacctacagagtctctgacaaagtgggcataagattcttgaagcttggttaccagttcggcggtgacaagtacgtctagggcgcagtagtcaagtgtttcttgaatgatgtcataacctggttggtttttcttttcccacagttcgcggttgagaaggtattcttcgcgatccttccagtactcttctagcggaaacccgtctttgtctgcacggtaagatcctagcatgtagaactgattaactgccttgtaagggcagcagcccttctctacgggtagagagtatgcttgagcagcttttcgtagcgaagcgtgagtaagggcaaaggtgtctctgaccatgactttgaggaattggtatttgaagtcgatgtcgtcacaggctccctgttcccagagttggaagtctacccgtttcttgtaggcggggttgggcaaagcgaaagtaacatcattgaagagaatcttgccggccctgggcatgaaattgcgagtgatgcgaaaaggctgtggtacttccgctcggttattgataacctgggcagctaggacgatctcgtcgaaaccgttgatgttgtgtcctacgatgtataattctatgaaacgcggcgtgcctctgacgtgaggtagcttactgagctcatcaaaggttaggtctgtggggtcagataaggcgtagtgttcgagagcccattcgtgcaggtgaggattcgctttaaggaaggaggaccagaggtccactgccagtgctgtttgtaactggtcccggtactgacgaaaatgccgtccgactgccattttttctggggtgacgcaatagaaggtttgggggtcctgccgccagcgatcccacttgagttttatggcgaggtcataggcgatgttgacgagccgctggtctccagagagtttcatgaccagcatgaaggggattagctgcttgccaaaggaccccatccaggtgtaggtttccacatcgtaggtgagaaagagcctttctgtgcgaggatgagagccaatcgggaagaactggatctcctgccaccagttggaggaatggctgttgatgtgatggaagtagaactccctgcgacgcgccgagcattcatgcttgtgcttgtacagacggccgcagtagtcgcagcgttgcacgggttgtatctcgtgaatgagttgtacctggcttcccttgacgagaaatttcagtgggaagccgaggcctggcgattgtatctcgtgctttactatgttgtctgcatcggcctgttcatcttctgtctcgatggtggtcatgctgacgagccctcgcgggaggcaagtccagacctcggcgcggcaggggcggagctcgaggacgagagcgcgcaggctggagctgtccagggtcctgagacgctgcggactcaggttagtaggcagtgtcaggagattaacttgcatgatcttttggagggcgtgcgggaggttcagatagtacttgatctcaacgggtccgttggtggagatgtcgatggcttgcagggttccgtgtcccttgggcgctaccaccgtgcccttgtttttcattttggacggcggtggctctgttgcttcttgcatgtttagaagcggtgtcgagggcgcgcaccgggcggcaggggcggctcgggacccggcggcatggctggcagtggtacgtcggcgccgcgcgcgggtaggttctggtactgcgccctgagaagactcgcatgcgcgacgacgcggcggttgacatcctggatctgacgcctctgggtgaaagctaccggccccgtgagcttgaacctgaaagagagttcaacagaatcaatctcggtatcgttgacggcggcttgcctaaggatttcttgcacgtcaccagagttgtcctggtaggcgatctccgccatgaactgctcgatctcttcctcttgaagatctccgcggcccgctctctcgacggtggccgcgaggtcgttggagatgcgcccaatgagttgagagaatgcattcatgcccgcctcgttccagacgcggctgtagaccacggcccccacgggatctctcgcgcgcatgaccacctgggcgaggttgagctccacgtggcgggtgaagaccgcatagttgcataggcgctggaaaaggtagttgagtgtggtggcgatgtgctcggtgacgaagaaatacatgatccatcgtctcagcggcatctcgctgacatcgcccagagcttccaagcgctccatggcctcgtagaagtccacggcaaaattaaaaaactgggagtttcgcgcggacacggtcaactcctcttccagaagacggataagttcggcgatggtggtgcgcacctcgcgctcgaaagcccctgggatttcttcctcaatctcttcttcttccactaacatctcttcctcttcaggtggggctgcaggaggagggggaacgcggcgacgccggcggcgcacgggcagacggtcgatgaatctttcaatgacctctccgcggcggcggcgcatggtttcagtgacggcgcggccgttctcgcgcggtcgcagagtaaaaacaccgccgcgcatctccttaaagtggtgactgggaggttctccgtttgggagggagagggcgctgattatacattttattaattggcccgtagggactgcacgcagagatctgatcgtgtcaagatccacgggatctgaaaacctttcgacgaaagcgtctaaccagtcacagtcacaaggtaggctgagtacggcttcttgtgggcgggggtggttatgtgttcggtctgggtcttctgtttcttcttcatctcgggaaggtgagacgatgctgctggtgatgaaattaaagtaggcagttctaagacggcggatggtggcgaggagcaccaggtctttgggtccggcttgctggatacgcaggcgattggccattccccaagcattatcctgacatctagcaagatctttgtagtagtcttgcatgagccgttctacgggcacttcttcctcacccgttctgccatgcatacgtgtgagtccaaatccgcgcattggttgtaccagtgccaagtcagctacgactctttcggcgaggatggcttgctgtacttgggtaagggtggcttgaaagtcatcaaaatccacaaagcggtggtaagctcctgtattaatggtgtaagcacagttggccatgactgaccagttaactgtctggtgaccagggcgcacgagctcggtgtatttaaggcgcgaataggcgcgggtgtcaaagatgtaatcgttgcaggtgcgcaccagatactggtaccctataagaaaatgcggcggtggttggcggtagagaggccatcgttctgtagctggagcgccaggggcgaggtcttccaacataaggcggtgatagccgtagatgtacctggacatccaggtgattcctgcggcggtagtagaagcccgaggaaactcgcgtacgcggttccaaatgttgcgtagcggcatgaagtagttcattgtaggcacggtttgaccagtgaggcgcgcgcagtcattgatgctctatagacacggagaaaatgaaagcgttcagcgactcgactccgtagcctggaggaacgtgaacgggttgggtcgcggtgtaccccggttcgagacttgtactcgagccggccggagccgcggctaacgtggtattggcactcccgtctcgacccagcctacaaaaatccaggatacggaatcgagtcgttttgctggtttccgaatggcagggaagtgagtcctattttttttttttgccgctcagatgcatcccgtgctgcgacagatgcgcccccaacaacagcccccctcgcagcagcagcagcagcaatcacaaaaggctgtccctgcaactactgcaactgccgccgtgagcggtgcgggacagcccgcctatgatctggacttggaagagggcgaaggactggcacgtctaggtgcgccttcacccgagcggcatccgcgagttcaactgaaaaaagattctcgcgaggcgtatgtgccccaacagaacctatttagagacagaagcggcgaggagccggaggagatgcgagcttcccgctttaacgcgggtcgtgagctgcgtcacggtttggaccgaagacgagtgttgcgggacgaggatttcgaagttgatgaaatgacagggatcagtcctgccagggcacacgtggctgcagccaaccttgtatcggcttacgagcagacagtaaaggaagagcgtaacttccaaaagtcttttaataatcatgtgcgaaccctgattgcccgcgaagaagttacccttggtttgatgcatttgtgggatttgatggaagctatcattcagaaccctactagcaaacctctgaccgcccagctgtttctggtggtgcaacacagcagagacaatgaggctttcagagaggcgctgctgaacatcaccgaacccgaggggagatggttgtatgatcttatcaacattctacagagtatcatagtgcaggagcggagcctgggcctggccgagaaggtggctgccatcaattactcggttttgagcttgggaaaatattacgctcgcaaaatctacaagactccatacgttcccatagacaaggaggtgaagatagatgggttctacatgcgcatgacgctcaaggtcttgaccctgagcgatgatcttggggtgtatcgcaatgacagaatgcatcgcgcggttagcgccagcaggaggcgcgagttaagcgacagggaactgatgcacagtttgcaaagagctctgactggagctggaaccgagggtgagaattacttcgacatgggagctgacttgcagtggcagcctagtcgcagggctctgagcgccgcgacggcaggatgtgagcttccttacatagaagaggcggatgaaggcgaggaggaagagggcgagtacttggaagactgatggcacaacccgtgttttttgctagatggaacagcaagcaccggatcccgcaatgcgggcggcgctgcagagccagccgtccggcattaactcctcggacgattggacccaggccatgcaacgtatcatggcgttgacgactcgcaaccccgaagcctttagacagcaaccccaggccaaccgtctatcggccatcatggaagctgtagtgccttcccgctctaatcccactcatgagaaggtcctggccatcgtgaacgcgttggtggagaacaaagctattcgtccagatgaggccggactggtatacaacgctctcttagaacgcgtggctcgctacaacagtagcaatgtgcaaaccaatttggaccgtatgataacagatgtacgcgaagccgtgtctcagcgcgaaaggttccagcgtgatgccaacctgggttcgctggtggcgttaaatgctttcttgagtactcagcctgctaatgtgccgcgtggtcaacaggattatactaactttttaagtgctttgagactgatggtatcagaagtacctcagagcgaagtgtatcagtccggtcctgattacttctttcagactagcagacagggcttgcagacggtaaatctgagccaagcttttaaaaaccttaaaggtttgtggggagtgcatgccccggtaggagaaagagcaaccgtgtctagcttgttaactccgaactcccgcctattattactgttggtagctcctttcaccgacagcggtagcatcgaccgtaattcctatttgggttacctactaaacctgtatcgcgaagccatagggcaaagtcaggtggacgagcagacctatcaagaaattacccaagtcagtcgcgctttgggacaggaagacactggcagtttggaagccactctgaacttcttgcttaccaatcggtctcaaaagatccctcctcaatatgctcttactgcggaggaggagaggatccttagatatgtgcagcagagcgtgggattgtttctgatgcaagagggggcaactccgactgcagcactggacatgacagcgcgaaatatggagcccagcatgtatgccagtaaccgacctttcattaacaaactgctggactacttgcacagagctgccgctatgaactctgattatttcaccaatgccatcttaaacccgcactggctgcccccacctggtttctacacgggcgaatatgacatgcccgaccctaatgacggatttctgtgggacgacgtggacagcgatgttttttcacctctttctgatcatcgcacgtggaaaaaggaaggcggcgatagaatgcattcttctgcatcgctgtccggggtcatgggtgctaccgcggctgagcccgagtctgcaagtccttttcctagtctacccttttctctacacagtgtacgtagcagcgaagtgggtagaataagtcgcccgagtttaatgggcgaagaggagtatctaaacgattccttgctcagaccggcaagagaaaaaaatttcccaaacaatggaatagaaagtttggtggataaaatgagtagatggaagacttatgctcaggatcacagagacgagcctgggatcatggggattacaagtagagcgagccgtagacgccagcgccatgacagacagaggggtcttgtgtgggacgatgaggattcggccgatgatagcagcgtgctggacttgggtgggagaggaaggggcaacccgtttgctcatttgcgccctcgcttgggtggtatgttgtaaaaaaaaataaaaaaaaaactcaccaaggccatggcgacgagcgtacgttcgttcttctttattatctgtgtctagtataatgaggcgagtcgtgctaggcggagcggtggtgtatccggagggtcctcctccttcgtacgagagcgtgatgcagcagcagcaggcgacggcggtgatgcaatccccactggaggctccctttgtgcctccgcgatacctggcacctacggagggcagaaacagcattcgttattcggaactggcacctcagtacgataccaccaggttgtatctggtggacaacaagtcggcggacattgcttctctgaactatcagaatgaccacagcaacttcttgaccacggtggtgcaaaacaatgactttacccctacggaagccagcacccagaccattaactttgatgaacgatcgcggtggggcggtcagctaaagaccatcatgcatactaacatgccaaacgtgaacgagtatatgtttagtaacaagttcaaagcgcgtgtgatggtgtccagaaaacctcccgacggtgctgcagttggggatacttatgatcacaagcaggatattttgaaatatgagtggttcgagtttactttgccagaaggcaacttttcagttactatgactattgatttgatgaacaatgccatcatagataattacttgaaagtgggtagacagaatggagtgcttgaaagtgacattggtgttaagttcgacaccaggaacttcaagctgggatgggatcccgaaaccaagttgatcatgcctggagtgtatacgtatgaagccttccatcctgacattgtcttactgcctggctgcggagtggattttaccgagagtcgtttgagcaaccttcttggtatcagaaaaaaacagccatttcaagagggttttaagattttgtatgaagatttagaaggtggtaatattccggccctcttggatgtagatgcctatgagaacagtaagaaagaacaaaaagccaaaatagaagctgctacagctgctgcagaagctaaggcaaacatagttgccagcgactctacaagggttgctaacgctggagaggtcagaggagacaattttgcgccaacacctgttccgactgcagaatcattattggccgatgtgtctgaaggaacggacgtgaaactcactattcaacctgtagaaaaagatagtaagaatagaagctataatgtgttggaagacaaaatcaacacagcctatcgcagttggtatctttcgtacaattatggcgatcccgaaaaaggagtgcgttcctggacattgctcaccacctcagatgtcacctgcggagcagagcaggtctactggtcgcttccagacatgatgaaggatcctgtcactttccgctccactagacaagtcagtaactaccctgtggtgggtgcagagcttatgcccgtcttctcaaagagcttctacaacgaacaagctgtgtactcccagcagctccgccagtccacctcgcttacgcacgtcttcaaccgctttcctgagaaccagattttaatccgtccgccggcgcccaccattaccaccgtcagtgaaaacgttcctgctctcacagatcacgggaccctgccgttgcgcagcagtatccggggagtccaacgtgtgaccgttactgacgccagacgccgcacctgtccctacgtgtacaaggcactgggcatagtcgcaccgcgcgtcctttcaagccgcactttctaaaaaaaaaaaaaatgtccattcttatctcgcccagtaataacaccggttggggtctgcgcgctccaagcaagatgtacggaggcgcacgcaaacgttctacccaacatcctgtccgtgttcgcggacattttcgcgctccatggggcgccctcaagggccgcactcgcgttcgaaccaccgtcgatgatgtaatcgatcaggtggttgccgacgcccgtaattatactcctactgcgcctacatctactgtggatgcagttattgacagtgtagtggctgacgctcgcaactatgctcgacgtaagagccggcgaaggcgcattgccagacgccaccgagctaccactgccatgcgagccgcaagagctctgctacgaagagctagacgcgtggggcgaagagccatgcttagggcggccagacgtgcagcttcgggcgccagcgccggcaggtcccgcaggcaagcagccgctgtcgcagcggcgactattgccgacatggcccaatcgcgaagaggcaatgtatactgggtgcgtgacgctgccaccggtcaacgtgtacccgtgcgcacccgtccccctcgcacttagaagatactgagcagtctccgatgttgtgtcccagcggcgaggatgtccaagcgcaaatacaaggaagaaatgctgcaggttatcgcacctgaagtctacggccaaccgttgaaggatgaaaaaaaaccccgcaaaatcaagcgggttaaaaaggacaaaaaagaagaggaagatggcgatgatgggctggcggagtttgtgcgcgagtttgccccacggcgacgcgtgcaatggcgtgggcgcaaagttcgacatgtgttgagacctggaacttcggtggtctttacacccggcgagcgttcaagcgctacttttaagcgttcctatgatgaggtgtacggggatgatgatattcttgagcaggcggctgaccgattaggcgagtttgcttatggcaagcgtagtagaataacttccaaggatgagacagtgtcgatacccttggatcatggaaatcccacccctagtcttaaaccggtcactttgcagcaagtgttacccgtaactccgcgaacaggtgttaaacgcgaaggtgaagatttgtatcccactatgcaactgatggtacccaaacgccagaagttggaggacgttttggagaaagtaaaagtggatccagatattcaacctgaggttaaagtgagacccattaagcaggtagcgcctggtctgggggtacaaactgtagacattaagattcccactgaaagtatggaagtgcaaactgaacccgcaaagcctactgccacctccactgaagtgcaaacggatccatggatgcccatgcctattacaactgacgccgccggtcccactcgaagatcccgacgaaagtacggtccagcaagtctgttgatgcccaattatgttgtacacccatctattattcctactcctggttaccgaggcactcgctactatcgcagccgaaacagtacctcccgccgtcgccgcaagacacctgcaaatcgcagtcgtcgccgtagacgcacaagcaaaccgactcccggcgccctggtgcggcaagtgtaccgcaatggtagtgcggaacctttgacactgccgcgtgcgcgttaccatccgagtatcatcacttaatcaatgttgccgctgcctccttgcagatatggccctcacttgtcgccttcgcgttcccatcactggttaccgaggaagaaactcgcgccgtagaagagggatgttgggacgcggaatgcgacgctacaggcgacggcgtgctatccgcaagcaattgcggggtggttttttaccagccttaattccaattatcgctgctgcaattggcgcgataccaggcatagcttccgtggcggttcaggcctcgcaacgacattgacattggaaaaaaacgtataaataaaaaaaaaaaaatacaatggactctgacactcctggtcctgtgactatgttttcttagagatggaagacatcaatttttcatccttggctccgcgacacggcacgaagccgtacatgggcacctggagcgacatcggcacgagccaactgaacgggggcgccttcaattggagcagtatctggagcgggcttaaaaattttggctcaaccataaaaacatacgggaacaaagcttggaacagcagtacaggacaggcgcttagaaataaacttaaagaccagaacttccaacaaaaagtagtcgatgggatagcttccggcatcaatggagtggtagatttggctaaccaggctgtgcagaaaaagataaacagtcgtttggacccgccgccagcaaccccaggtgaaatgcaagtggaggaagaaattcctccgccagaaaaacgaggcgacaagcgtccgcgtcccgatttggaagagacgctggtgacgcgcgtagatgaaccgccttcttatgaggaagcaacgaagcttggaatgcccaccactagaccgatagccccaatggccaccggggtgatgaaaccttctcagttgcatcgacccgtcaccttggatttgccccctccccctgctgctactgctgtacccgcttctaagcctgtcgctgccccgaaaccagtcgccgtagccaggtcacgtcccgggggcgctcctcgtccaaatgcgcactggcaaaatactctgaacagcatcgtgggtctaggcgtgcaaagtgtaaaacgccgtcgctgcttttaattaaatatggagtagcgcttaacttgcctatctgtgtatatgtgtcattacacgccgtcacagcagcagaggaaaaaaggaagaggtcgtgcgtcgacgctgagttactttcaagatggccaccccatcgatgctgccccaatgggcatacatgcacatcgccggacaggatgcttcggagtacctgagtccgggtctggtgcagttcgcccgcgccacagacacctacttcaatctgggaaataagtttagaaatcccaccgtagcgccgacccacgatgtgaccaccgaccgtagccagcggctcatgttgcgcttcgtgcccgttgaccgggaggacaatacatactcttacaaagtgcggtacaccctggccgtgggcgacaacagagtgctggatatggccagcacgttctttgacattaggggtgtgttggacagaggtcccagtttcaaaccctattctggtacggcttacaactccctggctcctaaaggcgctccaaatacatctcagtggattgcagaaggtgtaaaaaatacaactggtgaggaacacgtaacagaagaggaaaccaatactactacttacacttttggcaatgctcctgtaaaagctgaagctgaaattacaaaagaaggactcccagtaggtttggaagtttcagatgaagaaagtaaaccgatttatgctgataaaacatatcagccagaacctcagctgggagatgaaacttggactgaccttgatggaaaaaccgaaaagtatggaggcagggctctcaaacccgatactaagatgaaaccatgctacgggtcctttgccaaacctactaatgtgaaaggcggtcaggcaaaacaaaaaacaacggagcagccaaatcagaaagtcgaatatgatatcgacatggagttttttgatgcggcatcgcagaaaacaaacttaagtcctaaaattgtcatgtatgcagaaaatgtaaatttggaaactccagacactcatgtagtgtacaaacctggaacagaagacacaagttccgaagctaatttgggacaacaatctatgcccaacagacccaactacattggcttcagagataactttattggacttatgtactataacagtactggtaacatgggggtgctggctggtcaagcgtctcagttaaatgcagtggttgacttgcaggacagaaacacagaactttcttaccaactcttgcttgactctctgggcgacagaaccagatactttagcatgtggaatcaggctgtggacagttatgatcctgatgtacgtgttattgaaaatcatggtgtggaagatgaacttcccaactactgttttccactggacggcataggtgttccaacaaccagttacaaatcaatagttccaaatggagacaatgcgcctaattggaaggaacctgaagtaaatggaacaagtgagatcggacagggtaatttgtttgccatggaaattaaccttcaagccaatctatggcgaagtttcctttattccaatgtggctctatatctcccagactcgtacaaatacaccccgtccaatgtcactcttccagaaaacaaaaacacctacgactacatgaacgggcgggtggtgccgccatctctagtagacacctatgtgaacattggtgccaggtggtctctggatgccatggacaatgtcaacccattcaaccaccaccgtaacgctggcttgcgttaccgatccatgcttctgggtaacggacgttatgtgcctttccacatacaagtgcctcaaaaattcttcgctgttaaaaacctgctgcttctcccaggctcctacacttatgagtggaactttaggaaggatgtgaacatggttctacagagttccctcggtaacgacctgcgggtagatggcgccagcatcagtttcacgagcatcaacctctatgctacttttttccccatggctcacaacaccgcttccacccttgaagccatgctgcggaatgacaccaatgatcagtcattcaacgactacctatctgcagctaacatgctctaccccattcctgccaatgcaaccaatattcccatttccattccttctcgcaactgggcggctttcagaggctggtcatttaccagactgaaaaccaaagaaactccctctttggggtctggatttgacccctactttgtctattctggttctattccctacctggatggtaccttctacctgaaccacacttttaagaaggtttccatcatgtttgactcttcagtgagctggcctggaaatgacaggttactatctcctaacgaatttgaaataaagcgcactgtggatggcgaaggctacaacgtagcccaatgcaacatgaccaaagactggttcttggtacagatgctcgccaactacaacatcggctatcagggcttctacattccagaaggatacaaagatcgcatgtattcatttttcagaaacttccagcccatgagcaggcaggtggttgatgaggtcaattacaaagacttcaaggccgtcgccataccctaccaacacaacaactctggctttgtgggttacatggctccgaccatgcgccaaggtcaaccctatcccgctaactatccctatccactcattggaacaactgccgtaaatagtgttacgcagaaaaagttcttgtgtgacagaaccatgtggcgcataccgttctcgagcaacttcatgtctatgggggcccttacagacttgggacagaatatgctctatgccaactcagctcatgctctggacatgacctttgaggtggatcccatggatgagcccaccctgctttatcttctcttcgaagttttcgacgtggtcagagtgcatcagccacaccgcggcatcatcgaggcagtctacctgcgtacaccgttctcggccggtaacgctaccacgtaagaagcttcttgcttcttgcaaatagcagctgcaaccatggcctgcggatcccaaaacggctccagcgagcaagagctcagagccattgtccaagacctgggttgcggaccctattttttgggaacctacgataagcgcttcccggggttcatggcccccgataagctcgcctgtgccattgtaaatacggccggacgtgagacggggggagagcactggttggctttcggttggaacccacgttctaacacctgctacctttttgatccttttggattctcggatgatcgtctcaaacagatttaccagtttgaatatgagggtctcctgcgccgcagcgctcttgctaccaaggaccgctgtattacgctggaaaaatctacccagaccgtgcagggtccccgttctgccgcctgcggacttttctgctgcatgttccttcacgcctttgtgcactggcctgaccgtcccatggacggaaaccccaccatgaaattgctaactggagtgccaaacaacatgcttcattctcctaaagtccagcccaccctgtgtgacaatcaaaaagcactctaccattttcttaatacccattcgccttattttcgctcccatcgtacacacatcgaaagggccactgcgttcgaccgtatggatgttcaataatgactcatgtaaacaacgtgttcaataaacatcactttatttttttacatgtatcaaggctctgcattacttatttatttacaagtcgaatgggttctgacgagaatcagaatgacccgcaggcagtgatacgttgcggaactgatacttgggttgccacttgaattcgggaatcaccaacttgggaaccggtatatcgggcaggatgtcactccacagctttctggtcagctgcaaagctccaagcaggtcaggagccgaaatcttgaaatcacaattaggaccagtgctttgagcgcgagagttgcggtacaccggattgcagcactgaaacaccatcagcgacggatgtctcacgcttgccagcacggtgggatctgcaatcatgcccacatccagatcttcagcattggcaatgctgaacggggtcatcttgcaggtctgcctacccatggcgggcacccaattaggcttgtggttgcaatcgcagtgcagggggatcagtatcatcttggcctgatcctgtctgattcctggatacacggctctcatgaaagcatcatattgcttgaaagcctgctgggctttactaccctcggtataaaacatcccgcaggacctgctcgaaaactggttagctgcacagccggcatcattcacacagcagcgggcgtcattgttagctatttgcaccacacttctgccccagcggttttgggtgattttggttcgctcgggattctcctttaaggctcgttgtccgttctcgctggccacatccatctcgataatctgctccttctgaatcataatattgccatgcaggcacttcagcttgccctcataatcattgcagccatgaggccacaacgcacagcctgtacattcccaattatggtgggcgatctgagaaaaagaatgtatcattccctgcagaaatcttcccatcatcgtgctcagtgtcttgtgactagtgaaagttaactggatgcctcggtgctcctcgtttacgtactggtgacagatgcgcttgtattgttcgtgttgctcaggcattagtttaaaagaggttctaagttcgttatccagcctgtacttctccatcagcagacacatcacttccatgcctttctcccaagcagacaccaggggcaagctaatcggattcttaacagtgcaggcagcagctcctttagccagagggtcatctttagcgatcttctcaatgcttcttttgccatccttctcaacgatgcgcacgggcgggtagctgaaacccactgctacaagttgcgcctcttctctttcttcttcgctgtcttgactgatgtcttgcatggggatatgtttggtcttccttggcttctttttggggggtatcggaggaggaggactgtcgctccgttccggagacagggaggattgtgacgtttcgctcaccattaccaactgactgtcggtagaagaacctgaccccacacggcgacaggtgtttctcttcgggggcagaggtggaggcgattgcgaagggctgcggtccgacctggaaggcggatgactggcagaaccccttccgcgttcgggggtgtgctccctgtggcggtcgcttaactgatttccttcgcggctggccattgtgttctcctaggcagagaaacaacagacatggaaactcagccattgctgtcaacatcgccacgagtgccatcacatctcgtcctcagcgacgaggaaaaggagcagagcttaagcattccaccgcccagtcctgccaccacctctaccctagaagataaggaggtcgacgcatctcatgacatgcagaataaaaaagcgaaagagtctgagacagacatcgagcaagacccgggctatgtgacaccggtggaacacgaggaagagttgaaacgctttctagagagagaggatgaaaactgcccaaaacaacgagcagataactatcaccaagatgctggaaatagggatcagaacaccgactacctcatagggcttgacggggaagacgcgctccttaaacatctagcaagacagtcgctcatagtcaaggatgcattattggacagaactgaagtgcccatcagtgtggaagagctcagccgcgcctacgagcttaacctcttttcacctcgtactccccccaaacgtcagccaaacggcacctgcgagccaaatcctcgcttaaacttttatccagcttttgctgtgccagaagtactggctacctatcacatcttttttaaaaatcaaaaaattccagtctcctgccgcgctaatcgcacccgcgccgatgccctactcaatctgggacctggttcacgcttacctgatatagcttccttggaagaggttccaaagatcttcgagggtctgggcaataatgagactcgggccgcaaatgctctgcaaaagggagaaaatggcatggatgagcatcacagcgttctggtggaattggaaggcgataatgccagactcgcagtactcaagcgaagcatcgaggtcacacacttcgcatatcccgctgtcaacctgccccctaaagtcatgacggcggtcatggaccagttactcattaagcgcgcaagtcccctttcagaagacatgcatgacccagatgcctgtgatgagggtaaaccagtggtcagtgatgagcagctaacccgatggctgggcaccgactctcccagggatttggaagagcgtcgcaagcttatgatggccgtggtgctggttaccgtagaactagagtgtctccgacgtttctttaccgattcagaaaccttgcgcaaactcgaagagaatctgcactacacttttagacacggctttgtgcggcaggcatgcaagatatctaacgtggaactcaccaacctggtttcctacatgggtattctgcatgagaatcgcctaggacaaagcgtgctgcacagcaccctgaagggggaagcccgccgtgattacatccgcgattgtgtctatctgtacctgtgccacacgtggcaaaccggcatgggtgtatggcagcaatgtttagaagaacagaacttgaaagagcttgacaagctcttacagaaatctcttaaggttctgtggacagggttcgacgagcgcaccgtcgcttccgacctggcagacctcatcttcccagagcgtctcagggttactttgcgaaacggattgcctgactttatgagccagagcatgcttaacaattttcgctctttcatcctggaacgctccggtatcctgcccgccacctgctgcgcactgccctccgactttgtgcctctcacctaccgcgagtgccccccgccgctatggagtcactgctacctgttccgtctggccaactatctctcctaccactcggatgtgatcgaggatgtgagcggagacggcttgctggagtgtcactgccgctgcaatctgtgcacgccccaccggtccctagcttgcaacccccagttgatgagcgaaacccagataataggcacctttgaattgcaaggccccagcagccaaggcgatgggtcttctcctgggcaaagtttaaaactgaccccgggactgtggacctccgcctacttgcgcaagtttgctccggaagattaccacccctatgaaatcaagttctatgaggaccaatcacagcctccaaaggccgaactttcggcctgcgtcatcacccagggggcaattctggcccaattgcaagccatccaaaaatcccgccaagaatttctactgaaaaagggtaagggggtctaccttgacccccagaccggcgaggaactcaacacaaggttccctcaggatgtcccaacgacgagaaaacaagaagttgaaggtgcagccgccgcccccagaagatatggaggaagattgggacagtcaggcagaggaggcggaggaggacagtctggaggacagtctggaggaagacagtttggaggaggaaaacgaggaggcagaggaggtggaagaagtaaccgccgacaaacagttatcctcggctgcggagacaagcaacagcgctaccatctccgctccgagtcgaggaacccggcggcgtcccagcagtagatgggacgagaccggacgcttcccgaacccaaccagcgcttccaagaccggtaagaaggatcggcagggatacaagtcctggcgggggcataagaatgccatcatctcctgcttgcatgagtgcgggggcaacatatccttcacgcggcgctacttgctattccaccatggggtgaactttccgcgcaatgttttgcattactaccgtcacctccacagcccctactatagccagcaaatcccggcagtctcgacagataaagacagcggcggcgacctccaacagaaaaccagcagcggcagttagaaaatacacaacaagtgcagcaacaggaggattaaagattacagccaacgagccagcgcaaacccgagagttaagaaatcggatctttccaaccctgtatgccatcttccagcagagtcggggtcaagagcaggaactgaaaataaaaaaccgatctctgcgttcgctcaccagaagttgtttgtatcacaagagcgaagatcaacttcagcgcactctcgaggacgccgaggctctcttcaacaagtactgcgcgctgactcttaaagagtaggcagcgaccgcgcttattcaaaaaaggcgggaattacatcatcctcgacatgagtaaagaaattcccacgccttacatgtggagttatcaaccccaaatgggattggcggcaggcgcctcccaggactactccacccgcatgaattggctcagcgccgggccttctatgatttctcgagttaatgatatacgcgcctaccgaaaccaaatacttttggaacagtcagctcttaccaccacgccccgccaacaccttaatcccagaaattggcccgccgccctagtgtaccaggaaagtcccgctcccaccactgtattacttcctcgagacgcccaggccgaagtccaaatgactaatgcaggtgcgcagttagctggcggctccaccctatgtcgtcacaggcctcggcataatataaaacgcctgatgatcagaggccgaggtatccagctcaacgacgagtcggtgagctctccgcttggtctacgaccagacggaatctttcagattgccggctgcgggagatcttccttcacccctcgtcaggctgttctgactttggaaagttcgtcttcgcaaccccgctcgggcggaatcgggaccgttcaatttgtggaggagtttactccctctgtctacttcaaccccttctccggatctcctgggcattacccggacgagttcataccgaacttcgacgcgattagcgagtcagtggacggctacgattgatgtctggtgacgcggctgagctatctcggctgcgacatctagaccactgccgccgctttcgctgctttgcccgggaactcattgagttcatctacttcgaactccccaaggatcaccctcaaggtccggcccacggagtgcggatttctatcgaaggcaaaatagactctcgcctgcaacgaattttctcccagcggcccgtgctgatcgagcgagaccagggaaacaccacggtttccatctactgcatttgtaatcaccccggattgcatgaaagcctttgctgtcttatgtgtactgagtttaataaaaactgaattaagactctcctacggactgccgcttcttcaacccggattttacaaccagaagaacgaaacttttcctgtcgtccaggactctgttaacttcacctttcctactcacaaactagaagctcaacgactacaccgcttttccagaagcattttccctactaatactactttcaaaaccggaggtgagctccaaggtcttcctacagaaaacccttgggtggaagcgggccttgtagtgctaggaattcttgcgggtgggcttgtgattattctttgctacctatacacaccttgcttcactttcttagtggtgttgtggtattggtttaaaaaatggggcccatactagtcttgcttgttttactttcgcttttggaaccgggttctgccaattacgatccatgtctagacttcgacccagaaaactgcacacttacttttgcacccgacacaagccgcatctgtggagttcatcgcctctcttacgaacttggcccccaacgacaaaaatttacctgcatggtgggaatcaaccccatagttatcacccagcaaagtggagatactaagggttgcattcactgctcctgcgattccatcgagtgcacctacaccctgctgaagaccctatgcggcctaagagacctgctaccaatgaattaaaaaatgattaataaaaaatcacttacttgaaatcagcaataaggtctctgttgaaattttctcccagcagcacctcacttccctcttcccaactctggtattctaaaccccgttcagcggcatactttctccatactttaaaggggatgtcaaattttagctcctctcctgtacccacaatcttcatgtctttcttcccagatgaccaagagagtccggctcagtgactccttcaaccctgtctacccctatgaagatgaaagcacctcccaacacccctttataaacccagggtttatttccccaaatggcttcacacaaagcccaaacggagttcttactttaaaatgtttaaccccactaacaaccacaggcggatctctacagctaaaagtgggagggggacttacagtggatgacaccaacggttttttgaaagaaaacataagtgccaccacaccactcgttaagactggtcactctataggtttaccactaggagccggattgggaacgaatgaaaataaactttgtatcaaattaggacaaggacttacattcaattcaaacaacatttgcattgatgacaatattaacaccttatggacaggagtcaaccccaccgaagccaactgtcaaatcatgaactccagtgaatctaatgattgcaaattaattctaacactagttaaaactggagcactagtcactgcatttgtttatgttataggagtatctaacaattttaatatgctaactacacacagaaatataaattttactgcagagctgtttttcgattctactggtaatttactaactagactctcatccctcaaaactccacttaatcataaatcaggacaaaacatggctactggtgccattactaatgctaaaggtttcatgcccagcacgactgcctatcctttcaatgataattctagagaaaaagaaaactacatttacggaacttgttactacacagctagtgatcgcactgcttttcccattgacatatctgtcatgcttaaccgaagagcaataaatgacgagacatcatattgtattcgtataacttggtcctggaacacaggagatgccccagaggtgcaaacctctgctacaaccctagtcacctccccatttaccttttactacatcagagaagacgactgacaaataaagtttgcgatcgccaggcccaccatgtgtccagcgcgcagcctcctccttgtggctaccctggtcctcctggaccacctcagtttggccagaaacctccccgtggccactccagacccaggaatgttcccatgccttcaccactcccaaaacctgctgagggccgtcagcaacatgctccagaaggccagacaaactctagaattttacccttgcacttctgaagagattgatcatgaagatatcacaaaagataaaaccagcacagtggaggcctgtttaccattggaattaaccaagaatgagagttgcctaaattccagagagacctctttcataactaatgggagttgcctggcctccagaaagacctcttttatgatggccctgtgccttagtagtatttatgaagacttgaagatgtaccaggtggagttcaagaccatgaatgcaaagcttctgatggatcctaagaggcagatctttctagatcaaaacatgctggcagttattgatgagctgatgcaggccctgaatttcaacagtgagactgtgccacaaaaatcctcccttgaagaaccggatttttataaaactaaaatcaagctctgcatacttcttcatgctttcagaattcgggcagtgactattgatagagtgatgagctatctgaatgcttccggagggggcggcagcgggggaggcggcagcggcggcgggggatcgatatgggaactgaagaaagatgtttatgtcgtagaattggattggtatccggatgcccctggagaaatggtggtcctcacctgtgacacccctgaagaagatggtatcacctggaccttggaccagagcagtgaggtcttaggctctggcaaaaccctgaccatccaagtcaaagagtttggagatgctggccagtacacctgtcacaaaggaggcgaggttctaagccattcgctcctgctgcttcacaaaaaggaagatggaatttggtccactgatattttaaaggaccagaaagaacccaaaaataagacctttctaagatgcgaggccaagaattattctggacgtttcacctgctggtggctgacgacaatcagtactgatttgacattcagtgtcaaaagcagcagaggctcttctgacccccaaggggtgacgtgcggagctgctacactctctgcagagagagtcagaggggacaacaaggagtatgagtactcagtggagtgccaggaggacagtgcctgcccagctgctgaggagagtctgcccattgaggtcatggtggatgccgttcacaagctcaagtatgaaaactacaccagcagcttcttcatcagggacatcatcaaacctgacccacccaagaacttgcagctgaagccattaaagaattctcggcaggtggaggtcagctgggagtaccctgacacctggagtactccacattcctacttctccctgacattctgcgttcaggtccagggcaagagcaagagagaaaagaaagatagagtcttcacggacaagacctcagccacggtcatctgccgcaaaaatgccagcattagcgtgcgggcccaggaccgctactatagctcatcttggagcgaatgggcatctgtgccctgcagttaagctagcttgactgactgagatacagcgtaccttcagctcacagacatgataagatacattgatgagtttggacaaaccacaactagaatgcagtgaaaaaaatgctttatttgtgaaatttgtgatgctattgctttatttgtaaccattataagctgcaataaacaagttaacaacaacaattgcattcattttatgtttcaggttcagggggaggtgtgggaggttttttaaagcaagtaaaacctctacaaatgtggtagtcgtcagctatcctgcaggaacttgtttatttgaaaatcaattcacaaaatccgagtagttattttgcctcccccttcccatttaacagaatacaccaatctctccccacgcacagctttaaacatttggataccattagatatagacatggttttagattccacattccaaacagtttcagagcgagccaatctggggtcagtgatagataaaaatccatcgggatagtcttttaaagcgctttcacagtccaactgctgcggatgcgactccggagtctggatcacggtcatctggaagaagaacgatgggaatcataatccgaaaacggtatcggacgattgtgtctcatcaaacccacaagcagccgctgtctgcgtcgctccgtgcgactgctgtttatgggatcagggtccacagtgtcctgaagcatgattttaatagcccttaacatcaactttctggtgcgatgcgcgcagcaacgcattctgatttcactcaaatctttgcagtaggtacaacacattattacaatattgtttaataaaccataattaaaagcgctccagccaaaactcatatctgatataatcgcccctgcatgaccatcataccaaagtttaatataaattaaatgacgttccctcaaaaacacactacccacatacatgatctcttttggcatgtgcatattaacaatctgtctgtaccatggacaacgttggttaatcatgcaacccaatataaccttccggaaccacactgccaacaccgctcccccagccatgcattgaagtgaaccctgctgattacaatgacaatgaagaacccaattctctcgaccgtgaatcacttgagaatgaaaaatatctatagtggcacaacatagacataaatgcatgcatcttctcataatttttaactcctcaggatttagaaacatatcccagggaataggaagctcttgcagaacagtaaagctggcagaacaaggaagaccacgaacacaacttacactatgcatagtcatagtatcacaatctggcaacagcgggtggtcttcagtcatagaagctcgggtttcattttcctcacaacgtggtaactgggctctggtgtaagggtgatgtctggcgcatgatgtcgagcgtgcgcgcaaccttgtcataatggagttgcttcctgacattctcgtattttgtatagcaaaacgcggccctggcagaacacactcttcttcgccttctatcctgccgcttagcgtgttccgtgtgatagttcaagtacaaccacactcttaagttggtcaaaagaatgctggcttcagttgtaatcaaaactccatcgcatctaatcgttctgaggaaatcatccaagcaatgcaactggattgtgtttcaagcaggagaggagagggaagagacggaagaaccatgttaatttttattccaaacgatctcgcagtacttcaaattgtagatcgcgcagatggcatctctcgcccccactgtgttggtgaaaaagcacagctagatcaaaagaaatgcgattttcaaggtgctcaacggtggcttccagcaaagcctccacgcgcacatccaagaacaaaagaataccaaaagaaggagcattttctaactcctcaatcatcatattacattcctgcaccattcccagataattttcagctttccagccttgaattattcgtgtcagttcttgtggtaaatccaatccacacattacaaacaggtcccggagggcgccctccaccaccattcttaaacacaccctcataatgacaaaatatcttgctcctgtgtcacctgtagcgaattgagaatggcaacatcaattgacatgcccttggctctaagttcttctttaagttctagttgtaaaaactctctcatattatcaccaaactgcttagccagaagccccccgggaacaagagcaggggacgctacagtgcagtacaagcgcagacctccccaattggctccagcaaaaacaagattggaataagcatattgggaaccgccagtaatatcatcgaagttgctggaaatataatcaggcagagtttcttgtaaaaattgaataaaagaaaaatttgccaaaaaaacattcaaaacctctgggatgcaaatgcaataggttaccgcgctgcgctccaacattgttagttttgaattagtctgcaaaaataaaaaaaaaaacaagcgtcatatcatagtagcctgacgaacagatggataaatcagtctttccatcacaagacaagccacagggtctccagctcgaccctcgtaaaacctgtcatcatgattaaacaacagcaccgaaagttcctcgcggtgaccagcatgaataattcttgatgaagcatacaatccagacatgttagcatcagttaacgagaaaaaacagccaacatagcctttgggtataattatgcttaatcgtaagtatagcaaagccacccctcgcggatacaaagtaaaaggcacaggagaataaaaaatataattatttctctgctgctgttcaggcaacgtcgcccccggtccctctaaatacacatacaaagcctcatcagccatggcttaccagacaaagtacagcgggcacacaaagcacaagctctaaagtgactctccaacctctccacaatatatatatacacaagccctaaactgacgtaatgggagtaaagtgtaaaaaatcccgccaaacccaacacacaccccgaaactgcgtcaccagggaaaagtacagtttcacttccgcaatcccaacaggcgtaacttcctctttctcacggtacgtgatatcccactaacttgcaacgtcattttcccacggtcgcaccgccccttttagccgttaaccccacagccaatcaccacacgatccacactttttaaaatcacctcatttacatattggcaccattccatctataaggtatattatatagataga

SEQ ID NO: 77 - DNA, 34876 bp, Artificial Sequence
  Genome sequence of NG-704 virus
tctatctatataatataccttatagatggaatggtgccaatatgtaaatgaggtgattttaaaaagtgtggatcgtgtggtgattggctgtggggttaacggctaaaaggggcggtgcgaccgtgggaaaatgacgttttgtgggggtggagtttttttgcaagttgtcgcgggaaatgtgacgcataaaaaggcttttttctcacggaactacttagttttcccacggtatttaacaggaaatgaggtagttttgaccggatgcaagtgaaaattgttgattttcgcgcgaaaactgaatgaggaagtgtttttctgaataatgtggtatttatggcagggtggagtatttgttcagggccaggtagactttgacccattacgtggaggtttcgattaccgtgttttttacctgaatttccgcgtaccgtgtcaaagtcttctgtttttacgtaggtgtcagctgatcgctagggtatttatacctcagggtttgtgtcaagaggccactcttgagtgccagcgagaagagttttctcctctgcgccggcagtttaataataaaaaaatgagagatttgcgatttctgcctcaggaaataatctctgctgagactggaaatgaaatattggagcttgtggtgcacgccctgatgggagacgatccggagccacctgtgcagctttttgagcctcctacgcttcaggaactgtatgatttagaggtagagggatcggaggattctaatgaggaagctgtaaatggcttttttaccgattctatgcttttagctgctaatgaagggttagaattagatccgcctttggacacttttgatactccaggggtaattgtggaaagcggtacaggtgtaagaaaattacctgatttgagttccgtggactgtgatttgcactgctatgaagacgggtttcctccgagtgatgaggaggaccatgaaaaggagcagtccatgcagactgcagcgggtgagggagtgaaggctgccaatgttggttttcagttggattgcccggagcttcctggacatggctgtaagtcttgtgaatttcacaggaaaaatactggagtaaaggaactgttatgttcgctttgttatatgagaacgcactgccactttatttacagtaagtgtgtttaagttaaaatttaaaggaatatgctgtttttcacatgtatattgagtgtgagttttgtgcttcttattataggtcctgtgtctgatgctgatgaatcaccatctcctgattctactacctcacctcctgagattcaagcacctgttcctgtggacgtgcgcaagcccattcctgtgaagcttaagcctgggaaacgtccagcagtggaaaaacttgaggacttgttacagggtggggacggacctttggacttgagtacacggaaacgtccaagacaataagtgttccatatccgtgtttacttaaggtgacgtcaatatttgtgtgacagtgcaatgtaataaaaatatgttaactgttcactggtttttattgctttttgggcggggactcaggtatataagtagaagcagacctgtgtggttagctcataggagctggctttcatccatggaggtttgggccattttggaagaccttaggaagactaggcaactgttagagaacgcttcggacggagtctccggtttttggagattctggttcgctagtgaattagctagggtagtttttaggataaaacaggactataaacaagaatttgaaaagttgttggtagattgcccaggactttttgaagctcttaatttgggccatcaggttcactttaaagaaaaagttttatcagttttagacttttcaaccccaggtagaactgctgctgctgtggcttttcttacttttatattagataaatggatcccgcagactcatttcagcaggggatacgttttggatttcatagccacagcattgtggagaacatggaaggttcgcaagatgaggacaatcttaggttactggccagtgcagcctttgggtgtagcgggaatcctgaggcatccaccggtcatgccagcggttctggaggaggaacagcaagaggacaacccgagagccggcctggaccctccagtggaggaggcggagtagctgacttgtctcctgaactgcaacgggtgcttactggatctacgtccactggacgggataggggcgttaagagggagagggcatctagtggtactgatgctagatctgagttggctttaagtttaatgagtcgcagacgtcctgaaaccatttggtggcatgaggttcagaaagagggaagggatgaagtttctgtattgcaggagaaatattcactggaacaggtgaaaacatgttggttggagcctgaggatgattgggaggtggccattaaaaattatgccaagatagctttgaggcctgataaacagtataagattactagacggattaatatccggaatgcttgttacatatctggaaatggggctgaggtggtaatagatactcaagacaaggcagttattagatgctgcatgatggatatgtggcctggggtagtcggtatggaagcagtaacttttgtaaatgttaagtttaggggagatggttataatggaatagtgtttatggccaataccaaacttatattgcatggttgtagcttttttggtttcaacaatacctgtgtagatgcctggggacaggttagtgtacggggatgtagtttctatgcgtgttggattgccacagctggcagaaccaagagtcaattgtctctgaagaaatgcatatttcaaagatgtaacctgggcattctgaatgaaggcgaagcaagggtccgccactgcgcttctacagatactggatgttttattttgattaagggaaatgccagcgtaaagcataacatgatttgcggtgcttccgatgagaggccttatcaaatgctcacttgtgctggtgggcattgtaatatgctggctactgtgcatattgtttcccatcaacgcaaaaaatggcctgtttttgatcacaatgtgatgacgaagtgtaccatgcatgcaggtgggcgtagaggaatgtttatgccttaccagtgtaacatgaatcatgtgaaagtgttgttggaaccagatgccttttccagaatgagcctaacaggaatttttgacatgaacatgcaaatctggaagatcctgaggtatgatgatacgagatcgagggtacgcgcatgcgaatgcggaggcaagcatgccaggttccagccggtgtgtgtagatgtgactgaagatctcagaccggatcatttggttattgcccgcactggagcagagttcggatccagtggagaagaaactgactaaggtgagtattgggaaaactttggggtgggattttcagatggacagattgagtaaaaatttgttttttctgtcttgcagctgtcatgagtggaaacgcttcttttaaggggggagtcttcagcccttatctgacagggcgtctcccatcctgggcaggagttcgtcagaatgttatgggatctactgtggatggaagacccgtccaacccgccaattcttcaacgctgacctatgctactttaagttcttcacctttggacgcagctgcagctgccgccgccgcttctgttgccgctaacactgtgcttggaatgggttactatggaagcatcatggctaattccacttcctctaataacccttctaccctgactcaggacaagttacttgtccttttggcccagctggaggctttgacccaacgtctgggtgaactttctcagcaggtggtcgagttgcgagtacaaactgagtctgctgtcggcacggcaaagtctaaataaaaaaatcccagaatcaatgaataaataaacaagcttgttgttgatttaaaatcaagtgtttttatttcatttttcgcgcacggtatgccctagaccaccgatctctatcattgagaactcggtggattttttccaggatcctatagaggtgggattgaatgtttagatacatgggcattaggccgtctttggggtggagatagctccattgaagggattcatgctccggggtagtgttgtaaatcacccagtcataacaaggtcgcagtgcatggtgttgcacaatatcttttagaagtaggctgattgccacagataagcccttggtgtaggtgtttacaaaccggttgagctgggatgggtgcattcggggtgaaattatgtgcattttggattggatttttaagttggcaatattgccgccaagatcccgtcttgggttcatgttatgaaggaccaccaagacggtgtatccggtacatttaggaaatttatcgtgcagcttggatggaaaagcgtggaaaaatttggagacacccttgtgtcctccaagattttccatgcactcatccatgataatagcaatggggccgtgggcagcggcgcgggcaaacacgttccgtgggtctgacacatcatagttatgttcctgagttaaatcatcataagccattttaatgaatttggggcggagagtaccagattggggtatgaatgttccttcgggccccggagcatagttcccctcacagatttgcatttcccaagctttcagttccgagggtggaatcatgtccacctggggggctatgaaaaacaccgtttctggggcgggggtgattaattgtgatgatagcaaatttctgagcaattgagatttgccacatccggtggggccataaatgattccgattacgggttgcaggtggtagtttagggaacggcaactgccgtcttctcgaagcaagggggccacctcgttcatcatttcccttacatgcatattttcccgcaccaaatccattaggaggcgctctcctcctagtgatagaagttcttgtagtgaggaaaagtttttcagcggtttcagaccgtcagccatgggcattttggagagagtttgctgcaaaagttctagtctgttccacagttcagtgatgtgttctatggcatctcgatccagcagacctcctcgtttcgcgggtttggacggctcctggaatagggtatgagacgatgggcgtccagcgctgccagggttcggtccttccagggtctcagtgttcgagtcagggttgtttccgtcacagtgaaggggtgtgcgcctgcttgggcgcttgccagggtgcgcttcagactcatcctgctggtcgaaaacttctgtcgcttggcgccctgtatgtcggccaagtagcagtttaccatgagttcgtagttgagcgcctcggctgcgtggcctttggcgcggagcttacctttggaagttttcttgcataccgggcagtataggcatttcagcgcatacaacttgggcgcaaggaaaacggattctggggagtatgcatctgcgccgcaggaggcgcaaacagtttcacattccaccagccaggttaaatccggttcattggggtcaaaaacaagttttccgccatattttttgatgcgtttcttacctttggtctccatgagttcgtgtcctcgttgagtgacaaacaggctgtccgtgtccccgtagactgattttacaggcctcttctccagtggagtgcctcggtcttcttcgtacaggaactctgaccactctgatacaaaggcgcgcgtccaggccagcacaaaggaggctatgtgggaggggtagcgatcgttgtcaaccagggggtccaccttttccaaagtatgcaaacacatgtcaccctcttcaacatccaggaatgtgattggcttgtaggtgtatttcacgtgacctggggtccccgctgggggggtataaaagggggcggttctttgctcttcctcactgtcttccggatcgctgtccaggaacgtcagctgttggggtaggtattccctctcgaaggcgggcatgacctctgcactcaggttgtcagtttctaagaacgaggaggatttgatattgacagtgccggttgagatgcctttcatgaggttttcgtccatctggtcagaaaacacaatttttttattgtcaagtttggtggcaaatgatccatacagggcgttggataaaagtttggcaatggatcgcatggtttggttcttttccttgtccgcgcgctctttggcggcgatgttgagttggacatactcgcgtgccaggcacttccattcggggaagatagttgttaattcatctggcacgattctcacttgccaccctcgattatgcaaggtaattaaatccacactggtggccacctcgcctcgaaggggttcattggtccaacagagcctacctcctttcctagaacagaaagggggaagtgggtctagcataagttcatcgggagggtctgcatccatggtaaagattcccggaagtaaatccttatcaaaatagctgatgggagtggggtcatctaaggccatttgccattctcgagctgccagtgcgcgctcatatgggttaaggggactgccccatggcatgggatgggtgagtgcagaggcatacatgccacagatgtcatagacgtagatgggatcctcaaagatgcctatgtaggttggatagcatcgcccccctctgatacttgctcgcacatagtcatatagttcatgtgatggcgctagcagccccggacccaagttggtgcgattgggtttttctgttctgtagacgatctggcgaaagatggcgtgagaattggaagagatggtgggtctttgaaaaatgttgaaatgggcatgaggtagacctacagagtctctgacaaagtgggcataagattcttgaagcttggttaccagttcggcggtgacaagtacgtctagggcgcagtagtcaagtgtttcttgaatgatgtcataacctggttggtttttcttttcccacagttcgcggttgagaaggtattcttcgcgatccttccagtactcttctagcggaaacccgtctttgtctgcacggtaagatcctagcatgtagaactgattaactgccttgtaagggcagcagcccttctctacgggtagagagtatgcttgagcagcttttcgtagcgaagcgtgagtaagggcaaaggtgtctctgaccatgactttgaggaattggtatttgaagtcgatgtcgtcacaggctccctgttcccagagttggaagtctacccgtttcttgtaggcggggttgggcaaagcgaaagtaacatcattgaagagaatcttgccggccctgggcatgaaattgcgagtgatgcgaaaaggctgtggtacttccgctcggttattgataacctgggcagctaggacgatctcgtcgaaaccgttgatgttgtgtcctacgatgtataattctatgaaacgcggcgtgcctctgacgtgaggtagcttactgagctcatcaaaggttaggtctgtggggtcagataaggcgtagtgttcgagagcccattcgtgcaggtgaggattcgctttaaggaaggaggaccagaggtccactgccagtgctgtttgtaactggtcccggtactgacgaaaatgccgtccgactgccattttttctggggtgacgcaatagaaggtttgggggtcctgccgccagcgatcccacttgagttttatggcgaggtcataggcgatgttgacgagccgctggtctccagagagtttcatgaccagcatgaaggggattagctgcttgccaaaggaccccatccaggtgtaggtttccacatcgtaggtgagaaagagcctttctgtgcgaggatgagagccaatcgggaagaactggatctcctgccaccagttggaggaatggctgttgatgtgatggaagtagaactccctgcgacgcgccgagcattcatgcttgtgcttgtacagacggccgcagtagtcgcagcgttgcacgggttgtatctcgtgaatgagttgtacctggcttcccttgacgagaaatttcagtgggaagccgaggcctggcgattgtatctcgtgctttactatgttgtctgcatcggcctgttcatcttctgtctcgatggtggtcatgctgacgagccctcgcgggaggcaagtccagacctcggcgcggcaggggcggagctcgaggacgagagcgcgcaggctggagctgtccagggtcctgagacgctgcggactcaggttagtaggcagtgtcaggagattaacttgcatgatcttttggagggcgtgcgggaggttcagatagtacttgatctcaacgggtccgttggtggagatgtcgatggcttgcagggttccgtgtcccttgggcgctaccaccgtgcccttgtttttcattttggacggcggtggctctgttgcttcttgcatgtttagaagcggtgtcgagggcgcgcaccgggcggcaggggcggctcgggacccggcggcatggctggcagtggtacgtcggcgccgcgcgcgggtaggttctggtactgcgccctgagaagactcgcatgcgcgacgacgcggcggttgacatcctggatctgacgcctctgggtgaaagctaccggccccgtgagcttgaacctgaaagagagttcaacagaatcaatctcggtatcgttgacggcggcttgcctaaggatttcttgcacgtcaccagagttgtcctggtaggcgatctccgccatgaactgctcgatctcttcctcttgaagatctccgcggcccgctctctcgacggtggccgcgaggtcgttggagatgcgcccaatgagttgagagaatgcattcatgcccgcctcgttccagacgcggctgtagaccacggcccccacgggatctctcgcgcgcatgaccacctgggcgaggttgagctccacgtggcgggtgaagaccgcatagttgcataggcgctggaaaaggtagttgagtgtggtggcgatgtgctcggtgacgaagaaatacatgatccatcgtctcagcggcatctcgctgacatcgcccagagcttccaagcgctccatggcctcgtagaagtccacggcaaaattaaaaaactgggagtttcgcgcggacacggtcaactcctcttccagaagacggataagttcggcgatggtggtgcgcacctcgcgctcgaaagcccctgggatttcttcctcaatctcttcttcttccactaacatctcttcctcttcaggtggggctgcaggaggagggggaacgcggcgacgccggcggcgcacgggcagacggtcgatgaatctttcaatgacctctccgcggcggcggcgcatggtttcagtgacggcgcggccgttctcgcgcggtcgcagagtaaaaacaccgccgcgcatctccttaaagtggtgactgggaggttctccgtttgggagggagagggcgctgattatacattttattaattggcccgtagggactgcacgcagagatctgatcgtgtcaagatccacgggatctgaaaacctttcgacgaaagcgtctaaccagtcacagtcacaaggtaggctgagtacggcttcttgtgggcgggggtggttatgtgttcggtctgggtcttctgtttcttcttcatctcgggaaggtgagacgatgctgctggtgatgaaattaaagtaggcagttctaagacggcggatggtggcgaggagcaccaggtctttgggtccggcttgctggatacgcaggcgattggccattccccaagcattatcctgacatctagcaagatctttgtagtagtcttgcatgagccgttctacgggcacttcttcctcacccgttctgccatgcatacgtgtgagtccaaatccgcgcattggttgtaccagtgccaagtcagctacgactctttcggcgaggatggcttgctgtacttgggtaagggtggcttgaaagtcatcaaaatccacaaagcggtggtaagctcctgtattaatggtgtaagcacagttggccatgactgaccagttaactgtctggtgaccagggcgcacgagctcggtgtatttaaggcgcgaataggcgcgggtgtcaaagatgtaatcgttgcaggtgcgcaccagatactggtaccctataagaaaatgcggcggtggttggcggtagagaggccatcgttctgtagctggagcgccaggggcgaggtcttccaacataaggcggtgatagccgtagatgtacctggacatccaggtgattcctgcggcggtagtagaagcccgaggaaactcgcgtacgcggttccaaatgttgcgtagcggcatgaagtagttcattgtaggcacggtttgaccagtgaggcgcgcgcagtcattgatgctctatagacacggagaaaatgaaagcgttcagcgactcgactccgtagcctggaggaacgtgaacgggttgggtcgcggtgtaccccggttcgagacttgtactcgagccggccggagccgcggctaacgtggtattggcactcccgtctcgacccagcctacaaaaatccaggatacggaatcgagtcgttttgctggtttccgaatggcagggaagtgagtcctattttttttttttgccgctcagatgcatcccgtgctgcgacagatgcgcccccaacaacagcccccctcgcagcagcagcagcagcaatcacaaaaggctgtccctgcaactactgcaactgccgccgtgagcggtgcgggacagcccgcctatgatctggacttggaagagggcgaaggactggcacgtctaggtgcgccttcacccgagcggcatccgcgagttcaactgaaaaaagattctcgcgaggcgtatgtgccccaacagaacctatttagagacagaagcggcgaggagccggaggagatgcgagcttcccgctttaacgcgggtcgtgagctgcgtcacggtttggaccgaagacgagtgttgcgggacgaggatttcgaagttgatgaaatgacagggatcagtcctgccagggcacacgtggctgcagccaaccttgtatcggcttacgagcagacagtaaaggaagagcgtaacttccaaaagtcttttaataatcatgtgcgaaccctgattgcccgcgaagaagttacccttggtttgatgcatttgtgggatttgatggaagctatcattcagaaccctactagcaaacctctgaccgcccagctgtttctggtggtgcaacacagcagagacaatgaggctttcagagaggcgctgctgaacatcaccgaacccgaggggagatggttgtatgatcttatcaacattctacagagtatcatagtgcaggagcggagcctgggcctggccgagaaggtggctgccatcaattactcggttttgagcttgggaaaatattacgctcgcaaaatctacaagactccatacgttcccatagacaaggaggtgaagatagatgggttctacatgcgcatgacgctcaaggtcttgaccctgagcgatgatcttggggtgtatcgcaatgacagaatgcatcgcgcggttagcgccagcaggaggcgcgagttaagcgacagggaactgatgcacagtttgcaaagagctctgactggagctggaaccgagggtgagaattacttcgacatgggagctgacttgcagtggcagcctagtcgcagggctctgagcgccgcgacggcaggatgtgagcttccttacatagaagaggcggatgaaggcgaggaggaagagggcgagtacttggaagactgatggcacaacccgtgttttttgctagatggaacagcaagcaccggatcccgcaatgcgggcggcgctgcagagccagccgtccggcattaactcctcggacgattggacccaggccatgcaacgtatcatggcgttgacgactcgcaaccccgaagcctttagacagcaaccccaggccaaccgtctatcggccatcatggaagctgtagtgccttcccgctctaatcccactcatgagaaggtcctggccatcgtgaacgcgttggtggagaacaaagctattcgtccagatgaggccggactggtatacaacgctctcttagaacgcgtggctcgctacaacagtagcaatgtgcaaaccaatttggaccgtatgataacagatgtacgcgaagccgtgtctcagcgcgaaaggttccagcgtgatgccaacctgggttcgctggtggcgttaaatgctttcttgagtactcagcctgctaatgtgccgcgtggtcaacaggattatactaactttttaagtgctttgagactgatggtatcagaagtacctcagagcgaagtgtatcagtccggtcctgattacttctttcagactagcagacagggcttgcagacggtaaatctgagccaagcttttaaaaaccttaaaggtttgtggggagtgcatgccccggtaggagaaagagcaaccgtgtctagcttgttaactccgaactcccgcctattattactgttggtagctcctttcaccgacagcggtagcatcgaccgtaattcctatttgggttacctactaaacctgtatcgcgaagccatagggcaaagtcaggtggacgagcagacctatcaagaaattacccaagtcagtcgcgctttgggacaggaagacactggcagtttggaagccactctgaacttcttgcttaccaatcggtctcaaaagatccctcctcaatatgctcttactgcggaggaggagaggatccttagatatgtgcagcagagcgtgggattgtttctgatgcaagagggggcaactccgactgcagcactggacatgacagcgcgaaatatggagcccagcatgtatgccagtaaccgacctttcattaacaaactgctggactacttgcacagagctgccgctatgaactctgattatttcaccaatgccatcttaaacccgcactggctgcccccacctggtttctacacgggcgaatatgacatgcccgaccctaatgacggatttctgtgggacgacgtggacagcgatgttttttcacctctttctgatcatcgcacgtggaaaaaggaaggcggcgatagaatgcattcttctgcatcgctgtccggggtcatgggtgctaccgcggctgagcccgagtctgcaagtccttttcctagtctacccttttctctacacagtgtacgtagcagcgaagtgggtagaataagtcgcccgagtttaatgggcgaagaggagtatctaaacgattccttgctcagaccggcaagagaaaaaaatttcccaaacaatggaatagaaagtttggtggataaaatgagtagatggaagacttatgctcaggatcacagagacgagcctgggatcatggggattacaagtagagcgagccgtagacgccagcgccatgacagacagaggggtcttgtgtgggacgatgaggattcggccgatgatagcagcgtgctggacttgggtgggagaggaaggggcaacccgtttgctcatttgcgccctcgcttgggtggtatgttgtaaaaaaaaataaaaaaaaaactcaccaaggccatggcgacgagcgtacgttcgttcttctttattatctgtgtctagtataatgaggcgagtcgtgctaggcggagcggtggtgtatccggagggtcctcctccttcgtacgagagcgtgatgcagcagcagcaggcgacggcggtgatgcaatccccactggaggctccctttgtgcctccgcgatacctggcacctacggagggcagaaacagcattcgttattcggaactggcacctcagtacgataccaccaggttgtatctggtggacaacaagtcggcggacattgcttctctgaactatcagaatgaccacagcaacttcttgaccacggtggtgcaaaacaatgactttacccctacggaagccagcacccagaccattaactttgatgaacgatcgcggtggggcggtcagctaaagaccatcatgcatactaacatgccaaacgtgaacgagtatatgtttagtaacaagttcaaagcgcgtgtgatggtgtccagaaaacctcccgacggtgctgcagttggggatacttatgatcacaagcaggatattttgaaatatgagtggttcgagtttactttgccagaaggcaacttttcagttactatgactattgatttgatgaacaatgccatcatagataattacttgaaagtgggtagacagaatggagtgcttgaaagtgacattggtgttaagttcgacaccaggaacttcaagctgggatgggatcccgaaaccaagttgatcatgcctggagtgtatacgtatgaagccttccatcctgacattgtcttactgcctggctgcggagtggattttaccgagagtcgtttgagcaaccttcttggtatcagaaaaaaacagccatttcaagagggttttaagattttgtatgaagatttagaaggtggtaatattccggccctcttggatgtagatgcctatgagaacagtaagaaagaacaaaaagccaaaatagaagctgctacagctgctgcagaagctaaggcaaacatagttgccagcgactctacaagggttgctaacgctggagaggtcagaggagacaattttgcgccaacacctgttccgactgcagaatcattattggccgatgtgtctgaaggaacggacgtgaaactcactattcaacctgtagaaaaagatagtaagaatagaagctataatgtgttggaagacaaaatcaacacagcctatcgcagttggtatctttcgtacaattatggcgatcccgaaaaaggagtgcgttcctggacattgctcaccacctcagatgtcacctgcggagcagagcaggtctactggtcgcttccagacatgatgaaggatcctgtcactttccgctccactagacaagtcagtaactaccctgtggtgggtgcagagcttatgcccgtcttctcaaagagcttctacaacgaacaagctgtgtactcccagcagctccgccagtccacctcgcttacgcacgtcttcaaccgctttcctgagaaccagattttaatccgtccgccggcgcccaccattaccaccgtcagtgaaaacgttcctgctctcacagatcacgggaccctgccgttgcgcagcagtatccggggagtccaacgtgtgaccgttactgacgccagacgccgcacctgtccctacgtgtacaaggcactgggcatagtcgcaccgcgcgtcctttcaagccgcactttctaaaaaaaaaaaaaatgtccattcttatctcgcccagtaataacaccggttggggtctgcgcgctccaagcaagatgtacggaggcgcacgcaaacgttctacccaacatcctgtccgtgttcgcggacattttcgcgctccatggggcgccctcaagggccgcactcgcgttcgaaccaccgtcgatgatgtaatcgatcaggtggttgccgacgcccgtaattatactcctactgcgcctacatctactgtggatgcagttattgacagtgtagtggctgacgctcgcaactatgctcgacgtaagagccggcgaaggcgcattgccagacgccaccgagctaccactgccatgcgagccgcaagagctctgctacgaagagctagacgcgtggggcgaagagccatgcttagggcggccagacgtgcagcttcgggcgccagcgccggcaggtcccgcaggcaagcagccgctgtcgcagcggcgactattgccgacatggcccaatcgcgaagaggcaatgtatactgggtgcgtgacgctgccaccggtcaacgtgtacccgtgcgcacccgtccccctcgcacttagaagatactgagcagtctccgatgttgtgtcccagcggcgaggatgtccaagcgcaaatacaaggaagaaatgctgcaggttatcgcacctgaagtctacggccaaccgttgaaggatgaaaaaaaaccccgcaaaatcaagcgggttaaaaaggacaaaaaagaagaggaagatggcgatgatgggctggcggagtttgtgcgcgagtttgccccacggcgacgcgtgcaatggcgtgggcgcaaagttcgacatgtgttgagacctggaacttcggtggtctttacacccggcgagcgttcaagcgctacttttaagcgttcctatgatgaggtgtacggggatgatgatattcttgagcaggcggctgaccgattaggcgagtttgcttatggcaagcgtagtagaataacttccaaggatgagacagtgtcgatacccttggatcatggaaatcccacccctagtcttaaaccggtcactttgcagcaagtgttacccgtaactccgcgaacaggtgttaaacgcgaaggtgaagatttgtatcccactatgcaactgatggtacccaaacgccagaagttggaggacgttttggagaaagtaaaagtggatccagatattcaacctgaggttaaagtgagacccattaagcaggtagcgcctggtctgggggtacaaactgtagacattaagattcccactgaaagtatggaagtgcaaactgaacccgcaaagcctactgccacctccactgaagtgcaaacggatccatggatgcccatgcctattacaactgacgccgccggtcccactcgaagatcccgacgaaagtacggtccagcaagtctgttgatgcccaattatgttgtacacccatctattattcctactcctggttaccgaggcactcgctactatcgcagccgaaacagtacctcccgccgtcgccgcaagacacctgcaaatcgcagtcgtcgccgtagacgcacaagcaaaccgactcccggcgccctggtgcggcaagtgtaccgcaatggtagtgcggaacctttgacactgccgcgtgcgcgttaccatccgagtatcatcacttaatcaatgttgccgctgcctccttgcagatatggccctcacttgtcgccttcgcgttcccatcactggttaccgaggaagaaactcgcgccgtagaagagggatgttgggacgcggaatgcgacgctacaggcgacggcgtgctatccgcaagcaattgcggggtggttttttaccagccttaattccaattatcgctgctgcaattggcgcgataccaggcatagcttccgtggcggttcaggcctcgcaacgacattgacattggaaaaaaacgtataaataaaaaaaaaaaaatacaatggactctgacactcctggtcctgtgactatgttttcttagagatggaagacatcaatttttcatccttggctccgcgacacggcacgaagccgtacatgggcacctggagcgacatcggcacgagccaactgaacgggggcgccttcaattggagcagtatctggagcgggcttaaaaattttggctcaaccataaaaacatacgggaacaaagcttggaacagcagtacaggacaggcgcttagaaataaacttaaagaccagaacttccaacaaaaagtagtcgatgggatagcttccggcatcaatggagtggtagatttggctaaccaggctgtgcagaaaaagataaacagtcgtttggacccgccgccagcaaccccaggtgaaatgcaagtggaggaagaaattcctccgccagaaaaacgaggcgacaagcgtccgcgtcccgatttggaagagacgctggtgacgcgcgtagatgaaccgccttcttatgaggaagcaacgaagcttggaatgcccaccactagaccgatagccccaatggccaccggggtgatgaaaccttctcagttgcatcgacccgtcaccttggatttgccccctccccctgctgctactgctgtacccgcttctaagcctgtcgctgccccgaaaccagtcgccgtagccaggtcacgtcccgggggcgctcctcgtccaaatgcgcactggcaaaatactctgaacagcatcgtgggtctaggcgtgcaaagtgtaaaacgccgtcgctgcttttaattaaatatggagtagcgcttaacttgcctatctgtgtatatgtgtcattacacgccgtcacagcagcagaggaaaaaaggaagaggtcgtgcgtcgacgctgagttactttcaagatggccaccccatcgatgctgccccaatgggcatacatgcacatcgccggacaggatgcttcggagtacctgagtccgggtctggtgcagttcgcccgcgccacagacacctacttcaatctgggaaataagtttagaaatcccaccgtagcgccgacccacgatgtgaccaccgaccgtagccagcggctcatgttgcgcttcgtgcccgttgaccgggaggacaatacatactcttacaaagtgcggtacaccctggccgtgggcgacaacagagtgctggatatggccagcacgttctttgacattaggggtgtgttggacagaggtcccagtttcaaaccctattctggtacggcttacaactccctggctcctaaaggcgctccaaatacatctcagtggattgcagaaggtgtaaaaaatacaactggtgaggaacacgtaacagaagaggaaaccaatactactacttacacttttggcaatgctcctgtaaaagctgaagctgaaattacaaaagaaggactcccagtaggtttggaagtttcagatgaagaaagtaaaccgatttatgctgataaaacatatcagccagaacctcagctgggagatgaaacttggactgaccttgatggaaaaaccgaaaagtatggaggcagggctctcaaacccgatactaagatgaaaccatgctacgggtcctttgccaaacctactaatgtgaaaggcggtcaggcaaaacaaaaaacaacggagcagccaaatcagaaagtcgaatatgatatcgacatggagttttttgatgcggcatcgcagaaaacaaacttaagtcctaaaattgtcatgtatgcagaaaatgtaaatttggaaactccagacactcatgtagtgtacaaacctggaacagaagacacaagttccgaagctaatttgggacaacaatctatgcccaacagacccaactacattggcttcagagataactttattggacttatgtactataacagtactggtaacatgggggtgctggctggtcaagcgtctcagttaaatgcagtggttgacttgcaggacagaaacacagaactttcttaccaactcttgcttgactctctgggcgacagaaccagatactttagcatgtggaatcaggctgtggacagttatgatcctgatgtacgtgttattgaaaatcatggtgtggaagatgaacttcccaactactgttttccactggacggcataggtgttccaacaaccagttacaaatcaatagttccaaatggagacaatgcgcctaattggaaggaacctgaagtaaatggaacaagtgagatcggacagggtaatttgtttgccatggaaattaaccttcaagccaatctatggcgaagtttcctttattccaatgtggctctatatctcccagactcgtacaaatacaccccgtccaatgtcactcttccagaaaacaaaaacacctacgactacatgaacgggcgggtggtgccgccatctctagtagacacctatgtgaacattggtgccaggtggtctctggatgccatggacaatgtcaacccattcaaccaccaccgtaacgctggcttgcgttaccgatccatgcttctgggtaacggacgttatgtgcctttccacatacaagtgcctcaaaaattcttcgctgttaaaaacctgctgcttctcccaggctcctacacttatgagtggaactttaggaaggatgtgaacatggttctacagagttccctcggtaacgacctgcgggtagatggcgccagcatcagtttcacgagcatcaacctctatgctacttttttccccatggctcacaacaccgcttccacccttgaagccatgctgcggaatgacaccaatgatcagtcattcaacgactacctatctgcagctaacatgctctaccccattcctgccaatgcaaccaatattcccatttccattccttctcgcaactgggcggctttcagaggctggtcatttaccagactgaaaaccaaagaaactccctctttggggtctggatttgacccctactttgtctattctggttctattccctacctggatggtaccttctacctgaaccacacttttaagaaggtttccatcatgtttgactcttcagtgagctggcctggaaatgacaggttactatctcctaacgaatttgaaataaagcgcactgtggatggcgaaggctacaacgtagcccaatgcaacatgaccaaagactggttcttggtacagatgctcgccaactacaacatcggctatcagggcttctacattccagaaggatacaaagatcgcatgtattcatttttcagaaacttccagcccatgagcaggcaggtggttgatgaggtcaattacaaagacttcaaggccgtcgccataccctaccaacacaacaactctggctttgtgggttacatggctccgaccatgcgccaaggtcaaccctatcccgctaactatccctatccactcattggaacaactgccgtaaatagtgttacgcagaaaaagttcttgtgtgacagaaccatgtggcgcataccgttctcgagcaacttcatgtctatgggggcccttacagacttgggacagaatatgctctatgccaactcagctcatgctctggacatgacctttgaggtggatcccatggatgagcccaccctgctttatcttctcttcgaagttttcgacgtggtcagagtgcatcagccacaccgcggcatcatcgaggcagtctacctgcgtacaccgttctcggccggtaacgctaccacgtaagaagcttcttgcttcttgcaaatagcagctgcaaccatggcctgcggatcccaaaacggctccagcgagcaagagctcagagccattgtccaagacctgggttgcggaccctattttttgggaacctacgataagcgcttcccggggttcatggcccccgataagctcgcctgtgccattgtaaatacggccggacgtgagacggggggagagcactggttggctttcggttggaacccacgttctaacacctgctacctttttgatccttttggattctcggatgatcgtctcaaacagatttaccagtttgaatatgagggtctcctgcgccgcagcgctcttgctaccaaggaccgctgtattacgctggaaaaatctacccagaccgtgcagggtccccgttctgccgcctgcggacttttctgctgcatgttccttcacgcctttgtgcactggcctgaccgtcccatggacggaaaccccaccatgaaattgctaactggagtgccaaacaacatgcttcattctcctaaagtccagcccaccctgtgtgacaatcaaaaagcactctaccattttcttaatacccattcgccttattttcgctcccatcgtacacacatcgaaagggccactgcgttcgaccgtatggatgttcaataatgactcatgtaaacaacgtgttcaataaacatcactttatttttttacatgtatcaaggctctgcattacttatttatttacaagtcgaatgggttctgacgagaatcagaatgacccgcaggcagtgatacgttgcggaactgatacttgggttgccacttgaattcgggaatcaccaacttgggaaccggtatatcgggcaggatgtcactccacagctttctggtcagctgcaaagctccaagcaggtcaggagccgaaatcttgaaatcacaattaggaccagtgctttgagcgcgagagttgcggtacaccggattgcagcactgaaacaccatcagcgacggatgtctcacgcttgccagcacggtgggatctgcaatcatgcccacatccagatcttcagcattggcaatgctgaacggggtcatcttgcaggtctgcctacccatggcgggcacccaattaggcttgtggttgcaatcgcagtgcagggggatcagtatcatcttggcctgatcctgtctgattcctggatacacggctctcatgaaagcatcatattgcttgaaagcctgctgggctttactaccctcggtataaaacatcccgcaggacctgctcgaaaactggttagctgcacagccggcatcattcacacagcagcgggcgtcattgttagctatttgcaccacacttctgccccagcggttttgggtgattttggttcgctcgggattctcctttaaggctcgttgtccgttctcgctggccacatccatctcgataatctgctccttctgaatcataatattgccatgcaggcacttcagcttgccctcataatcattgcagccatgaggccacaacgcacagcctgtacattcccaattatggtgggcgatctgagaaaaagaatgtatcattccctgcagaaatcttcccatcatcgtgctcagtgtcttgtgactagtgaaagttaactggatgcctcggtgctcctcgtttacgtactggtgacagatgcgcttgtattgttcgtgttgctcaggcattagtttaaaagaggttctaagttcgttatccagcctgtacttctccatcagcagacacatcacttccatgcctttctcccaagcagacaccaggggcaagctaatcggattcttaacagtgcaggcagcagctcctttagccagagggtcatctttagcgatcttctcaatgcttcttttgccatccttctcaacgatgcgcacgggcgggtagctgaaacccactgctacaagttgcgcctcttctctttcttcttcgctgtcttgactgatgtcttgcatggggatatgtttggtcttccttggcttctttttggggggtatcggaggaggaggactgtcgctccgttccggagacagggaggattgtgacgtttcgctcaccattaccaactgactgtcggtagaagaacctgaccccacacggcgacaggtgtttctcttcgggggcagaggtggaggcgattgcgaagggctgcggtccgacctggaaggcggatgactggcagaaccccttccgcgttcgggggtgtgctccctgtggcggtcgcttaactgatttccttcgcggctggccattgtgttctcctaggcagagaaacaacagacatggaaactcagccattgctgtcaacatcgccacgagtgccatcacatctcgtcctcagcgacgaggaaaaggagcagagcttaagcattccaccgcccagtcctgccaccacctctaccctagaagataaggaggtcgacgcatctcatgacatgcagaataaaaaagcgaaagagtctgagacagacatcgagcaagacccgggctatgtgacaccggtggaacacgaggaagagttgaaacgctttctagagagagaggatgaaaactgcccaaaacaacgagcagataactatcaccaagatgctggaaatagggatcagaacaccgactacctcatagggcttgacggggaagacgcgctccttaaacatctagcaagacagtcgctcatagtcaaggatgcattattggacagaactgaagtgcccatcagtgtggaagagctcagccgcgcctacgagcttaacctcttttcacctcgtactccccccaaacgtcagccaaacggcacctgcgagccaaatcctcgcttaaacttttatccagcttttgctgtgccagaagtactggctacctatcacatcttttttaaaaatcaaaaaattccagtctcctgccgcgctaatcgcacccgcgccgatgccctactcaatctgggacctggttcacgcttacctgatatagcttccttggaagaggttccaaagatcttcgagggtctgggcaataatgagactcgggccgcaaatgctctgcaaaagggagaaaatggcatggatgagcatcacagcgttctggtggaattggaaggcgataatgccagactcgcagtactcaagcgaagcatcgaggtcacacacttcgcatatcccgctgtcaacctgccccctaaagtcatgacggcggtcatggaccagttactcattaagcgcgcaagtcccctttcagaagacatgcatgacccagatgcctgtgatgagggtaaaccagtggtcagtgatgagcagctaacccgatggctgggcaccgactctcccagggatttggaagagcgtcgcaagcttatgatggccgtggtgctggttaccgtagaactagagtgtctccgacgtttctttaccgattcagaaaccttgcgcaaactcgaagagaatctgcactacacttttagacacggctttgtgcggcaggcatgcaagatatctaacgtggaactcaccaacctggtttcctacatgggtattctgcatgagaatcgcctaggacaaagcgtgctgcacagcaccctgaagggggaagcccgccgtgattacatccgcgattgtgtctatctgtacctgtgccacacgtggcaaaccggcatgggtgtatggcagcaatgtttagaagaacagaacttgaaagagcttgacaagctcttacagaaatctcttaaggttctgtggacagggttcgacgagcgcaccgtcgcttccgacctggcagacctcatcttcccagagcgtctcagggttactttgcgaaacggattgcctgactttatgagccagagcatgcttaacaattttcgctctttcatcctggaacgctccggtatcctgcccgccacctgctgcgcactgccctccgactttgtgcctctcacctaccgcgagtgccccccgccgctatggagtcactgctacctgttccgtctggccaactatctctcctaccactcggatgtgatcgaggatgtgagcggagacggcttgctggagtgtcactgccgctgcaatctgtgcacgccccaccggtccctagcttgcaacccccagttgatgagcgaaacccagataataggcacctttgaattgcaaggccccagcagccaaggcgatgggtcttctcctgggcaaagtttaaaactgaccccgggactgtggacctccgcctacttgcgcaagtttgctccggaagattaccacccctatgaaatcaagttctatgaggaccaatcacagcctccaaaggccgaactttcggcctgcgtcatcacccagggggcaattctggcccaattgcaagccatccaaaaatcccgccaagaatttctactgaaaaagggtaagggggtctaccttgacccccagaccggcgaggaactcaacacaaggttccctcaggatgtcccaacgacgagaaaacaagaagttgaaggtgcagccgccgcccccagaagatatggaggaagattgggacagtcaggcagaggaggcggaggaggacagtctggaggacagtctggaggaagacagtttggaggaggaaaacgaggaggcagaggaggtggaagaagtaaccgccgacaaacagttatcctcggctgcggagacaagcaacagcgctaccatctccgctccgagtcgaggaacccggcggcgtcccagcagtagatgggacgagaccggacgcttcccgaacccaaccagcgcttccaagaccggtaagaaggatcggcagggatacaagtcctggcgggggcataagaatgccatcatctcctgcttgcatgagtgcgggggcaacatatccttcacgcggcgctacttgctattccaccatggggtgaactttccgcgcaatgttttgcattactaccgtcacctccacagcccctactatagccagcaaatcccggcagtctcgacagataaagacagcggcggcgacctccaacagaaaaccagcagcggcagttagaaaatacacaacaagtgcagcaacaggaggattaaagattacagccaacgagccagcgcaaacccgagagttaagaaatcggatctttccaaccctgtatgccatcttccagcagagtcggggtcaagagcaggaactgaaaataaaaaaccgatctctgcgttcgctcaccagaagttgtttgtatcacaagagcgaagatcaacttcagcgcactctcgaggacgccgaggctctcttcaacaagtactgcgcgctgactcttaaagagtaggcagcgaccgcgcttattcaaaaaaggcgggaattacatcatcctcgacatgagtaaagaaattcccacgccttacatgtggagttatcaaccccaaatgggattggcggcaggcgcctcccaggactactccacccgcatgaattggctcagcgccgggccttctatgatttctcgagttaatgatatacgcgcctaccgaaaccaaatacttttggaacagtcagctcttaccaccacgccccgccaacaccttaatcccagaaattggcccgccgccctagtgtaccaggaaagtcccgctcccaccactgtattacttcctcgagacgcccaggccgaagtccaaatgactaatgcaggtgcgcagttagctggcggctccaccctatgtcgtcacaggcctcggcataatataaaacgcctgatgatcagaggccgaggtatccagctcaacgacgagtcggtgagctctccgcttggtctacgaccagacggaatctttcagattgccggctgcgggagatcttccttcacccctcgtcaggctgttctgactttggaaagttcgtcttcgcaaccccgctcgggcggaatcgggaccgttcaatttgtggaggagtttactccctctgtctacttcaaccccttctccggatctcctgggcattacccggacgagttcataccgaacttcgacgcgattagcgagtcagtggacggctacgattgatgtctggtgacgcggctgagctatctcggctgcgacatctagaccactgccgccgctttcgctgctttgcccgggaactcattgagttcatctacttcgaactccccaaggatcaccctcaaggtccggcccacggagtgcggatttctatcgaaggcaaaatagactctcgcctgcaacgaattttctcccagcggcccgtgctgatcgagcgagaccagggaaacaccacggtttccatctactgcatttgtaatcaccccggattgcatgaaagcctttgctgtcttatgtgtactgagtttaataaaaactgaattaagactctcctacggactgccgcttcttcaacccggattttacaaccagaagaacgaaacttttcctgtcgtccaggactctgttaacttcacctttcctactcacaaactagaagctcaacgactacaccgcttttccagaagcattttccctactaatactactttcaaaaccggaggtgagctccaaggtcttcctacagaaaacccttgggtggaagcgggccttgtagtgctaggaattcttgcgggtgggcttgtgattattctttgctacctatacacaccttgcttcactttcttagtggtgttgtggtattggtttaaaaaatggggcccatactagtcttgcttgttttactttcgcttttggaaccgggttctgccaattacgatccatgtctagacttcgacccagaaaactgcacacttacttttgcacccgacacaagccgcatctgtggagttcatcgcctctcttacgaacttggcccccaacgacaaaaatttacctgcatggtgggaatcaaccccatagttatcacccagcaaagtggagatactaagggttgcattcactgctcctgcgattccatcgagtgcacctacaccctgctgaagaccctatgcggcctaagagacctgctaccaatgaattaaaaaatgattaataaaaaatcacttacttgaaatcagcaataaggtctctgttgaaattttctcccagcagcacctcacttccctcttcccaactctggtattctaaaccccgttcagcggcatactttctccatactttaaaggggatgtcaaattttagctcctctcctgtacccacaatcttcatgtctttcttcccagatgaccaagagagtccggctcagtgactccttcaaccctgtctacccctatgaagatgaaagcacctcccaacacccctttataaacccagggtttatttccccaaatggcttcacacaaagcccaaacggagttcttactttaaaatgtttaaccccactaacaaccacaggcggatctctacagctaaaagtgggagggggacttacagtggatgacaccaacggttttttgaaagaaaacataagtgccaccacaccactcgttaagactggtcactctataggtttaccactaggagccggattgggaacgaatgaaaataaactttgtatcaaattaggacaaggacttacattcaattcaaacaacatttgcattgatgacaatattaacaccttatggacaggagtcaaccccaccgaagccaactgtcaaatcatgaactccagtgaatctaatgattgcaaattaattctaacactagttaaaactggagcactagtcactgcatttgtttatgttataggagtatctaacaattttaatatgctaactacacacagaaatataaattttactgcagagctgtttttcgattctactggtaatttactaactagactctcatccctcaaaactccacttaatcataaatcaggacaaaacatggctactggtgccattactaatgctaaaggtttcatgcccagcacgactgcctatcctttcaatgataattctagagaaaaagaaaactacatttacggaacttgttactacacagctagtgatcgcactgcttttcccattgacatatctgtcatgcttaaccgaagagcaataaatgacgagacatcatattgtattcgtataacttggtcctggaacacaggagatgccccagaggtgcaaacctctgctacaaccctagtcacctccccatttaccttttactacatcagagaagacgactgacaaataaagtttgcgatcgccaggcccaccatgtgtcaccagcagttggtcatctcttggttttccctggtttttctggcatctcccctcgtggccatatgggaactgaagaaagatgtttatgtcgtagaattggattggtatccggatgcccctggagaaatggtggtcctcacctgtgacacccctgaagaagatggtatcacctggaccttggaccagagcagtgaggtcttaggctctggcaaaaccctgaccatccaagtcaaagagtttggagatgctggccagtacacctgtcacaaaggaggcgaggttctaagccattcgctcctgctgcttcacaaaaaggaagatggaatttggtccactgatattttaaaggaccagaaagaacccaaaaataagacctttctaagatgcgaggccaagaattattctggacgtttcacctgctggtggctgacgacaatcagtactgatttgacattcagtgtcaaaagcagcagaggctcttctgacccccaaggggtgacgtgcggagctgctacactctctgcagagagagtcagaggggacaacaaggagtatgagtactcagtggagtgccaggaggacagtgcctgcccagctgctgaggagagtctgcccattgaggtcatggtggatgccgttcacaagctcaagtatgaaaactacaccagcagcttcttcatcagggacatcatcaaacctgacccacccaagaacttgcagctgaagccattaaagaattctcggcaggtggaggtcagctgggagtaccctgacacctggagtactccacattcctacttctccctgacattctgcgttcaggtccagggcaagagcaagagagaaaagaaagatagagtcttcacggacaagacctcagccacggtcatctgccgcaaaaatgccagcattagcgtgcgggcccaggaccgctactatagctcatcttggagcgaatgggcatctgtgccctgcagtggagggggcggcagcgggggaggcggcagcggcggcgggggatcgagaaacctccccgtggccactccagacccaggaatgttcccatgccttcaccactcccaaaacctgctgagggccgtcagcaacatgctccagaaggccagacaaactctagaattttacccttgcacttctgaagagattgatcatgaagatatcacaaaagataaaaccagcacagtggaggcctgtttaccattggaattaaccaagaatgagagttgcctaaattccagagagacctctttcataactaatgggagttgcctggcctccagaaagacctcttttatgatggccctgtgccttagtagtatttatgaagacttgaagatgtaccaggtggagttcaagaccatgaatgcaaagcttctgatggatcctaagaggcagatctttctagatcaaaacatgctggcagttattgatgagctgatgcaggccctgaatttcaacagtgagactgtgccacaaaaatcctcccttgaagaaccggatttttataaaactaaaatcaagctctgcatacttcttcatgctttcagaattcgggcagtgactattgatagagtgatgagctatctgaatgcttccggaagcggagctactaacttcagcctgctgaagcaggctggagacgtggaggagaaccctggacctgccttgacctttgctttactggtggccctcctggtgctcagctgcaagtcaagctgctctgtgggctgtgatctgcctcaaacccacagcctgggtagcaggaggaccttgatgctcctggcacagatgaggagaatctctcttttctcctgcttgaaggacagacatgactttggatttccccaggaggagtttggcaaccagttccaaaaggctgaaaccatccctgtcctccatgagatgatccagcagatcttcaatctcttcagcacaaaggactcatctgctgcttgggatgagaccctcctagacaaattctacactgaactctaccagcagctgaatgacctggaagcctgtgtgatacagggggtgggggtgacagagactcccctgatgaaggaggactccattctggctgtgaggaaatacttccaaagaatcactctctatctgaaagagaagaaatacagcccttgtgcctgggaggttgtcagagcagaaatcatgagatctttttctttgtcaacaaacttgcaagaaagtttaagaagtaaggaataagctagcttgactgactgagatacagcgtaccttcagctcacagacatgataagatacattgatgagtttggacaaaccacaactagaatgcagtgaaaaaaatgctttatttgtgaaatttgtgatgctattgctttatttgtaaccattataagctgcaataaacaagttaacaacaacaattgcattcattttatgtttcaggttcagggggaggtgtgggaggttttttaaagcaagtaaaacctctacaaatgtggtagtcgtcagctatcctgcaggaacttgtttatttgaaaatcaattcacaaaatccgagtagttattttgcctcccccttcccatttaacagaatacaccaatctctccccacgcacagctttaaacatttggataccattagatatagacatggttttagattccacattccaaacagtttcagagcgagccaatctggggtcagtgatagataaaaatccatcgggatagtcttttaaagcgctttcacagtccaactgctgcggatgcgactccggagtctggatcacggtcatctggaagaagaacgatgggaatcataatccgaaaacggtatcggacgattgtgtctcatcaaacccacaagcagccgctgtctgcgtcgctccgtgcgactgctgtttatgggatcagggtccacagtgtcctgaagcatgattttaatagcccttaacatcaactttctggtgcgatgcgcgcagcaacgcattctgatttcactcaaatctttgcagtaggtacaacacattattacaatattgtttaataaaccataattaaaagcgctccagccaaaactcatatctgatataatcgcccctgcatgaccatcataccaaagtttaatataaattaaatgacgttccctcaaaaacacactacccacatacatgatctcttttggcatgtgcatattaacaatctgtctgtaccatggacaacgttggttaatcatgcaacccaatataaccttccggaaccacactgccaacaccgctcccccagccatgcattgaagtgaaccctgctgattacaatgacaatgaagaacccaattctctcgaccgtgaatcacttgagaatgaaaaatatctatagtggcacaacatagacataaatgcatgcatcttctcataatttttaactcctcaggatttagaaacatatcccagggaataggaagctcttgcagaacagtaaagctggcagaacaaggaagaccacgaacacaacttacactatgcatagtcatagtatcacaatctggcaacagcgggtggtcttcagtcatagaagctcgggtttcattttcctcacaacgtggtaactgggctctggtgtaagggtgatgtctggcgcatgatgtcgagcgtgcgcgcaaccttgtcataatggagttgcttcctgacattctcgtattttgtatagcaaaacgcggccctggcagaacacactcttcttcgccttctatcctgccgcttagcgtgttccgtgtgatagttcaagtacaaccacactcttaagttggtcaaaagaatgctggcttcagttgtaatcaaaactccatcgcatctaatcgttctgaggaaatcatccaagcaatgcaactggattgtgtttcaagcaggagaggagagggaagagacggaagaaccatgttaatttttattccaaacgatctcgcagtacttcaaattgtagatcgcgcagatggcatctctcgcccccactgtgttggtgaaaaagcacagctagatcaaaagaaatgcgattttcaaggtgctcaacggtggcttccagcaaagcctccacgcgcacatccaagaacaaaagaataccaaaagaaggagcattttctaactcctcaatcatcatattacattcctgcaccattcccagataattttcagctttccagccttgaattattcgtgtcagttcttgtggtaaatccaatccacacattacaaacaggtcccggagggcgccctccaccaccattcttaaacacaccctcataatgacaaaatatcttgctcctgtgtcacctgtagcgaattgagaatggcaacatcaattgacatgcccttggctctaagttcttctttaagttctagttgtaaaaactctctcatattatcaccaaactgcttagccagaagccccccgggaacaagagcaggggacgctacagtgcagtacaagcgcagacctccccaattggctccagcaaaaacaagattggaataagcatattgggaaccgccagtaatatcatcgaagttgctggaaatataatcaggcagagtttcttgtaaaaattgaataaaagaaaaatttgccaaaaaaacattcaaaacctctgggatgcaaatgcaataggttaccgcgctgcgctccaacattgttagttttgaattagtctgcaaaaataaaaaaaaaaacaagcgtcatatcatagtagcctgacgaacagatggataaatcagtctttccatcacaagacaagccacagggtctccagctcgaccctcgtaaaacctgtcatcatgattaaacaacagcaccgaaagttcctcgcggtgaccagcatgaataattcttgatgaagcatacaatccagacatgttagcatcagttaacgagaaaaaacagccaacatagcctttgggtataattatgcttaatcgtaagtatagcaaagccacccctcgcggatacaaagtaaaaggcacaggagaataaaaaatataattatttctctgctgctgttcaggcaacgtcgcccccggtccctctaaatacacatacaaagcctcatcagccatggcttaccagacaaagtacagcgggcacacaaagcacaagctctaaagtgactctccaacctctccacaatatatatatacacaagccctaaactgacgtaatgggagtaaagtgtaaaaaatcccgccaaacccaacacacaccccgaaactgcgtcaccagggaaaagtacagtttcacttccgcaatcccaacaggcgtaacttcctctttctcacggtacgtgatatcccactaacttgcaacgtcattttcccacggtcgcaccgccccttttagccgttaaccccacagccaatcaccacacgatccacactttttaaaatcacctcatttacatattggcaccattccatctataaggtatattatatagataga

SEQ ID NO: 78 - DNA, 34876 bp, Artificial Sequence
  Genome sequence of NG-706 virus
tctatctatataatataccttatagatggaatggtgccaatatgtaaatgaggtgattttaaaaagtgtggatcgtgtggtgattggctgtggggttaacggctaaaaggggcggtgcgaccgtgggaaaatgacgttttgtgggggtggagtttttttgcaagttgtcgcgggaaatgtgacgcataaaaaggcttttttctcacggaactacttagttttcccacggtatttaacaggaaatgaggtagttttgaccggatgcaagtgaaaattgttgattttcgcgcgaaaactgaatgaggaagtgtttttctgaataatgtggtatttatggcagggtggagtatttgttcagggccaggtagactttgacccattacgtggaggtttcgattaccgtgttttttacctgaatttccgcgtaccgtgtcaaagtcttctgtttttacgtaggtgtcagctgatcgctagggtatttatacctcagggtttgtgtcaagaggccactcttgagtgccagcgagaagagttttctcctctgcgccggcagtttaataataaaaaaatgagagatttgcgatttctgcctcaggaaataatctctgctgagactggaaatgaaatattggagcttgtggtgcacgccctgatgggagacgatccggagccacctgtgcagctttttgagcctcctacgcttcaggaactgtatgatttagaggtagagggatcggaggattctaatgaggaagctgtaaatggcttttttaccgattctatgcttttagctgctaatgaagggttagaattagatccgcctttggacacttttgatactccaggggtaattgtggaaagcggtacaggtgtaagaaaattacctgatttgagttccgtggactgtgatttgcactgctatgaagacgggtttcctccgagtgatgaggaggaccatgaaaaggagcagtccatgcagactgcagcgggtgagggagtgaaggctgccaatgttggttttcagttggattgcccggagcttcctggacatggctgtaagtcttgtgaatttcacaggaaaaatactggagtaaaggaactgttatgttcgctttgttatatgagaacgcactgccactttatttacagtaagtgtgtttaagttaaaatttaaaggaatatgctgtttttcacatgtatattgagtgtgagttttgtgcttcttattataggtcctgtgtctgatgctgatgaatcaccatctcctgattctactacctcacctcctgagattcaagcacctgttcctgtggacgtgcgcaagcccattcctgtgaagcttaagcctgggaaacgtccagcagtggaaaaacttgaggacttgttacagggtggggacggacctttggacttgagtacacggaaacgtccaagacaataagtgttccatatccgtgtttacttaaggtgacgtcaatatttgtgtgacagtgcaatgtaataaaaatatgttaactgttcactggtttttattgctttttgggcggggactcaggtatataagtagaagcagacctgtgtggttagctcataggagctggctttcatccatggaggtttgggccattttggaagaccttaggaagactaggcaactgttagagaacgcttcggacggagtctccggtttttggagattctggttcgctagtgaattagctagggtagtttttaggataaaacaggactataaacaagaatttgaaaagttgttggtagattgcccaggactttttgaagctcttaatttgggccatcaggttcactttaaagaaaaagttttatcagttttagacttttcaaccccaggtagaactgctgctgctgtggcttttcttacttttatattagataaatggatcccgcagactcatttcagcaggggatacgttttggatttcatagccacagcattgtggagaacatggaaggttcgcaagatgaggacaatcttaggttactggccagtgcagcctttgggtgtagcgggaatcctgaggcatccaccggtcatgccagcggttctggaggaggaacagcaagaggacaacccgagagccggcctggaccctccagtggaggaggcggagtagctgacttgtctcctgaactgcaacgggtgcttactggatctacgtccactggacgggataggggcgttaagagggagagggcatctagtggtactgatgctagatctgagttggctttaagtttaatgagtcgcagacgtcctgaaaccatttggtggcatgaggttcagaaagagggaagggatgaagtttctgtattgcaggagaaatattcactggaacaggtgaaaacatgttggttggagcctgaggatgattgggaggtggccattaaaaattatgccaagatagctttgaggcctgataaacagtataagattactagacggattaatatccggaatgcttgttacatatctggaaatggggctgaggtggtaatagatactcaagacaaggcagttattagatgctgcatgatggatatgtggcctggggtagtcggtatggaagcagtaacttttgtaaatgttaagtttaggggagatggttataatggaatagtgtttatggccaataccaaacttatattgcatggttgtagcttttttggtttcaacaatacctgtgtagatgcctggggacaggttagtgtacggggatgtagtttctatgcgtgttggattgccacagctggcagaaccaagagtcaattgtctctgaagaaatgcatatttcaaagatgtaacctgggcattctgaatgaaggcgaagcaagggtccgccactgcgcttctacagatactggatgttttattttgattaagggaaatgccagcgtaaagcataacatgatttgcggtgcttccgatgagaggccttatcaaatgctcacttgtgctggtgggcattgtaatatgctggctactgtgcatattgtttcccatcaacgcaaaaaatggcctgtttttgatcacaatgtgatgacgaagtgtaccatgcatgcaggtgggcgtagaggaatgtttatgccttaccagtgtaacatgaatcatgtgaaagtgttgttggaaccagatgccttttccagaatgagcctaacaggaatttttgacatgaacatgcaaatctggaagatcctgaggtatgatgatacgagatcgagggtacgcgcatgcgaatgcggaggcaagcatgccaggttccagccggtgtgtgtagatgtgactgaagatctcagaccggatcatttggttattgcccgcactggagcagagttcggatccagtggagaagaaactgactaaggtgagtattgggaaaactttggggtgggattttcagatggacagattgagtaaaaatttgttttttctgtcttgcagctgtcatgagtggaaacgcttcttttaaggggggagtcttcagcccttatctgacagggcgtctcccatcctgggcaggagttcgtcagaatgttatgggatctactgtggatggaagacccgtccaacccgccaattcttcaacgctgacctatgctactttaagttcttcacctttggacgcagctgcagctgccgccgccgcttctgttgccgctaacactgtgcttggaatgggttactatggaagcatcatggctaattccacttcctctaataacccttctaccctgactcaggacaagttacttgtccttttggcccagctggaggctttgacccaacgtctgggtgaactttctcagcaggtggtcgagttgcgagtacaaactgagtctgctgtcggcacggcaaagtctaaataaaaaaatcccagaatcaatgaataaataaacaagcttgttgttgatttaaaatcaagtgtttttatttcatttttcgcgcacggtatgccctagaccaccgatctctatcattgagaactcggtggattttttccaggatcctatagaggtgggattgaatgtttagatacatgggcattaggccgtctttggggtggagatagctccattgaagggattcatgctccggggtagtgttgtaaatcacccagtcataacaaggtcgcagtgcatggtgttgcacaatatcttttagaagtaggctgattgccacagataagcccttggtgtaggtgtttacaaaccggttgagctgggatgggtgcattcggggtgaaattatgtgcattttggattggatttttaagttggcaatattgccgccaagatcccgtcttgggttcatgttatgaaggaccaccaagacggtgtatccggtacatttaggaaatttatcgtgcagcttggatggaaaagcgtggaaaaatttggagacacccttgtgtcctccaagattttccatgcactcatccatgataatagcaatggggccgtgggcagcggcgcgggcaaacacgttccgtgggtctgacacatcatagttatgttcctgagttaaatcatcataagccattttaatgaatttggggcggagagtaccagattggggtatgaatgttccttcgggccccggagcatagttcccctcacagatttgcatttcccaagctttcagttccgagggtggaatcatgtccacctggggggctatgaaaaacaccgtttctggggcgggggtgattaattgtgatgatagcaaatttctgagcaattgagatttgccacatccggtggggccataaatgattccgattacgggttgcaggtggtagtttagggaacggcaactgccgtcttctcgaagcaagggggccacctcgttcatcatttcccttacatgcatattttcccgcaccaaatccattaggaggcgctctcctcctagtgatagaagttcttgtagtgaggaaaagtttttcagcggtttcagaccgtcagccatgggcattttggagagagtttgctgcaaaagttctagtctgttccacagttcagtgatgtgttctatggcatctcgatccagcagacctcctcgtttcgcgggtttggacggctcctggaatagggtatgagacgatgggcgtccagcgctgccagggttcggtccttccagggtctcagtgttcgagtcagggttgtttccgtcacagtgaaggggtgtgcgcctgcttgggcgcttgccagggtgcgcttcagactcatcctgctggtcgaaaacttctgtcgcttggcgccctgtatgtcggccaagtagcagtttaccatgagttcgtagttgagcgcctcggctgcgtggcctttggcgcggagcttacctttggaagttttcttgcataccgggcagtataggcatttcagcgcatacaacttgggcgcaaggaaaacggattctggggagtatgcatctgcgccgcaggaggcgcaaacagtttcacattccaccagccaggttaaatccggttcattggggtcaaaaacaagttttccgccatattttttgatgcgtttcttacctttggtctccatgagttcgtgtcctcgttgagtgacaaacaggctgtccgtgtccccgtagactgattttacaggcctcttctccagtggagtgcctcggtcttcttcgtacaggaactctgaccactctgatacaaaggcgcgcgtccaggccagcacaaaggaggctatgtgggaggggtagcgatcgttgtcaaccagggggtccaccttttccaaagtatgcaaacacatgtcaccctcttcaacatccaggaatgtgattggcttgtaggtgtatttcacgtgacctggggtccccgctgggggggtataaaagggggcggttctttgctcttcctcactgtcttccggatcgctgtccaggaacgtcagctgttggggtaggtattccctctcgaaggcgggcatgacctctgcactcaggttgtcagtttctaagaacgaggaggatttgatattgacagtgccggttgagatgcctttcatgaggttttcgtccatctggtcagaaaacacaatttttttattgtcaagtttggtggcaaatgatccatacagggcgttggataaaagtttggcaatggatcgcatggtttggttcttttccttgtccgcgcgctctttggcggcgatgttgagttggacatactcgcgtgccaggcacttccattcggggaagatagttgttaattcatctggcacgattctcacttgccaccctcgattatgcaaggtaattaaatccacactggtggccacctcgcctcgaaggggttcattggtccaacagagcctacctcctttcctagaacagaaagggggaagtgggtctagcataagttcatcgggagggtctgcatccatggtaaagattcccggaagtaaatccttatcaaaatagctgatgggagtggggtcatctaaggccatttgccattctcgagctgccagtgcgcgctcatatgggttaaggggactgccccatggcatgggatgggtgagtgcagaggcatacatgccacagatgtcatagacgtagatgggatcctcaaagatgcctatgtaggttggatagcatcgcccccctctgatacttgctcgcacatagtcatatagttcatgtgatggcgctagcagccccggacccaagttggtgcgattgggtttttctgttctgtagacgatctggcgaaagatggcgtgagaattggaagagatggtgggtctttgaaaaatgttgaaatgggcatgaggtagacctacagagtctctgacaaagtgggcataagattcttgaagcttggttaccagttcggcggtgacaagtacgtctagggcgcagtagtcaagtgtttcttgaatgatgtcataacctggttggtttttcttttcccacagttcgcggttgagaaggtattcttcgcgatccttccagtactcttctagcggaaacccgtctttgtctgcacggtaagatcctagcatgtagaactgattaactgccttgtaagggcagcagcccttctctacgggtagagagtatgcttgagcagcttttcgtagcgaagcgtgagtaagggcaaaggtgtctctgaccatgactttgaggaattggtatttgaagtcgatgtcgtcacaggctccctgttcccagagttggaagtctacccgtttcttgtaggcggggttgggcaaagcgaaagtaacatcattgaagagaatcttgccggccctgggcatgaaattgcgagtgatgcgaaaaggctgtggtacttccgctcggttattgataacctgggcagctaggacgatctcgtcgaaaccgttgatgttgtgtcctacgatgtataattctatgaaacgcggcgtgcctctgacgtgaggtagcttactgagctcatcaaaggttaggtctgtggggtcagataaggcgtagtgttcgagagcccattcgtgcaggtgaggattcgctttaaggaaggaggaccagaggtccactgccagtgctgtttgtaactggtcccggtactgacgaaaatgccgtccgactgccattttttctggggtgacgcaatagaaggtttgggggtcctgccgccagcgatcccacttgagttttatggcgaggtcataggcgatgttgacgagccgctggtctccagagagtttcatgaccagcatgaaggggattagctgcttgccaaaggaccccatccaggtgtaggtttccacatcgtaggtgagaaagagcctttctgtgcgaggatgagagccaatcgggaagaactggatctcctgccaccagttggaggaatggctgttgatgtgatggaagtagaactccctgcgacgcgccgagcattcatgcttgtgcttgtacagacggccgcagtagtcgcagcgttgcacgggttgtatctcgtgaatgagttgtacctggcttcccttgacgagaaatttcagtgggaagccgaggcctggcgattgtatctcgtgctttactatgttgtctgcatcggcctgttcatcttctgtctcgatggtggtcatgctgacgagccctcgcgggaggcaagtccagacctcggcgcggcaggggcggagctcgaggacgagagcgcgcaggctggagctgtccagggtcctgagacgctgcggactcaggttagtaggcagtgtcaggagattaacttgcatgatcttttggagggcgtgcgggaggttcagatagtacttgatctcaacgggtccgttggtggagatgtcgatggcttgcagggttccgtgtcccttgggcgctaccaccgtgcccttgtttttcattttggacggcggtggctctgttgcttcttgcatgtttagaagcggtgtcgagggcgcgcaccgggcggcaggggcggctcgggacccggcggcatggctggcagtggtacgtcggcgccgcgcgcgggtaggttctggtactgcgccctgagaagactcgcatgcgcgacgacgcggcggttgacatcctggatctgacgcctctgggtgaaagctaccggccccgtgagcttgaacctgaaagagagttcaacagaatcaatctcggtatcgttgacggcggcttgcctaaggatttcttgcacgtcaccagagttgtcctggtaggcgatctccgccatgaactgctcgatctcttcctcttgaagatctccgcggcccgctctctcgacggtggccgcgaggtcgttggagatgcgcccaatgagttgagagaatgcattcatgcccgcctcgttccagacgcggctgtagaccacggcccccacgggatctctcgcgcgcatgaccacctgggcgaggttgagctccacgtggcgggtgaagaccgcatagttgcataggcgctggaaaaggtagttgagtgtggtggcgatgtgctcggtgacgaagaaatacatgatccatcgtctcagcggcatctcgctgacatcgcccagagcttccaagcgctccatggcctcgtagaagtccacggcaaaattaaaaaactgggagtttcgcgcggacacggtcaactcctcttccagaagacggataagttcggcgatggtggtgcgcacctcgcgctcgaaagcccctgggatttcttcctcaatctcttcttcttccactaacatctcttcctcttcaggtggggctgcaggaggagggggaacgcggcgacgccggcggcgcacgggcagacggtcgatgaatctttcaatgacctctccgcggcggcggcgcatggtttcagtgacggcgcggccgttctcgcgcggtcgcagagtaaaaacaccgccgcgcatctccttaaagtggtgactgggaggttctccgtttgggagggagagggcgctgattatacattttattaattggcccgtagggactgcacgcagagatctgatcgtgtcaagatccacgggatctgaaaacctttcgacgaaagcgtctaaccagtcacagtcacaaggtaggctgagtacggcttcttgtgggcgggggtggttatgtgttcggtctgggtcttctgtttcttcttcatctcgggaaggtgagacgatgctgctggtgatgaaattaaagtaggcagttctaagacggcggatggtggcgaggagcaccaggtctttgggtccggcttgctggatacgcaggcgattggccattccccaagcattatcctgacatctagcaagatctttgtagtagtcttgcatgagccgttctacgggcacttcttcctcacccgttctgccatgcatacgtgtgagtccaaatccgcgcattggttgtaccagtgccaagtcagctacgactctttcggcgaggatggcttgctgtacttgggtaagggtggcttgaaagtcatcaaaatccacaaagcggtggtaagctcctgtattaatggtgtaagcacagttggccatgactgaccagttaactgtctggtgaccagggcgcacgagctcggtgtatttaaggcgcgaataggcgcgggtgtcaaagatgtaatcgttgcaggtgcgcaccagatactggtaccctataagaaaatgcggcggtggttggcggtagagaggccatcgttctgtagctggagcgccaggggcgaggtcttccaacataaggcggtgatagccgtagatgtacctggacatccaggtgattcctgcggcggtagtagaagcccgaggaaactcgcgtacgcggttccaaatgttgcgtagcggcatgaagtagttcattgtaggcacggtttgaccagtgaggcgcgcgcagtcattgatgctctatagacacggagaaaatgaaagcgttcagcgactcgactccgtagcctggaggaacgtgaacgggttgggtcgcggtgtaccccggttcgagacttgtactcgagccggccggagccgcggctaacgtggtattggcactcccgtctcgacccagcctacaaaaatccaggatacggaatcgagtcgttttgctggtttccgaatggcagggaagtgagtcctattttttttttttgccgctcagatgcatcccgtgctgcgacagatgcgcccccaacaacagcccccctcgcagcagcagcagcagcaatcacaaaaggctgtccctgcaactactgcaactgccgccgtgagcggtgcgggacagcccgcctatgatctggacttggaagagggcgaaggactggcacgtctaggtgcgccttcacccgagcggcatccgcgagttcaactgaaaaaagattctcgcgaggcgtatgtgccccaacagaacctatttagagacagaagcggcgaggagccggaggagatgcgagcttcccgctttaacgcgggtcgtgagctgcgtcacggtttggaccgaagacgagtgttgcgggacgaggatttcgaagttgatgaaatgacagggatcagtcctgccagggcacacgtggctgcagccaaccttgtatcggcttacgagcagacagtaaaggaagagcgtaacttccaaaagtcttttaataatcatgtgcgaaccctgattgcccgcgaagaagttacccttggtttgatgcatttgtgggatttgatggaagctatcattcagaaccctactagcaaacctctgaccgcccagctgtttctggtggtgcaacacagcagagacaatgaggctttcagagaggcgctgctgaacatcaccgaacccgaggggagatggttgtatgatcttatcaacattctacagagtatcatagtgcaggagcggagcctgggcctggccgagaaggtggctgccatcaattactcggttttgagcttgggaaaatattacgctcgcaaaatctacaagactccatacgttcccatagacaaggaggtgaagatagatgggttctacatgcgcatgacgctcaaggtcttgaccctgagcgatgatcttggggtgtatcgcaatgacagaatgcatcgcgcggttagcgccagcaggaggcgcgagttaagcgacagggaactgatgcacagtttgcaaagagctctgactggagctggaaccgagggtgagaattacttcgacatgggagctgacttgcagtggcagcctagtcgcagggctctgagcgccgcgacggcaggatgtgagcttccttacatagaagaggcggatgaaggcgaggaggaagagggcgagtacttggaagactgatggcacaacccgtgttttttgctagatggaacagcaagcaccggatcccgcaatgcgggcggcgctgcagagccagccgtccggcattaactcctcggacgattggacccaggccatgcaacgtatcatggcgttgacgactcgcaaccccgaagcctttagacagcaaccccaggccaaccgtctatcggccatcatggaagctgtagtgccttcccgctctaatcccactcatgagaaggtcctggccatcgtgaacgcgttggtggagaacaaagctattcgtccagatgaggccggactggtatacaacgctctcttagaacgcgtggctcgctacaacagtagcaatgtgcaaaccaatttggaccgtatgataacagatgtacgcgaagccgtgtctcagcgcgaaaggttccagcgtgatgccaacctgggttcgctggtggcgttaaatgctttcttgagtactcagcctgctaatgtgccgcgtggtcaacaggattatactaactttttaagtgctttgagactgatggtatcagaagtacctcagagcgaagtgtatcagtccggtcctgattacttctttcagactagcagacagggcttgcagacggtaaatctgagccaagcttttaaaaaccttaaaggtttgtggggagtgcatgccccggtaggagaaagagcaaccgtgtctagcttgttaactccgaactcccgcctattattactgttggtagctcctttcaccgacagcggtagcatcgaccgtaattcctatttgggttacctactaaacctgtatcgcgaagccatagggcaaagtcaggtggacgagcagacctatcaagaaattacccaagtcagtcgcgctttgggacaggaagacactggcagtttggaagccactctgaacttcttgcttaccaatcggtctcaaaagatccctcctcaatatgctcttactgcggaggaggagaggatccttagatatgtgcagcagagcgtgggattgtttctgatgcaagagggggcaactccgactgcagcactggacatgacagcgcgaaatatggagcccagcatgtatgccagtaaccgacctttcattaacaaactgctggactacttgcacagagctgccgctatgaactctgattatttcaccaatgccatcttaaacccgcactggctgcccccacctggtttctacacgggcgaatatgacatgcccgaccctaatgacggatttctgtgggacgacgtggacagcgatgttttttcacctctttctgatcatcgcacgtggaaaaaggaaggcggcgatagaatgcattcttctgcatcgctgtccggggtcatgggtgctaccgcggctgagcccgagtctgcaagtccttttcctagtctacccttttctctacacagtgtacgtagcagcgaagtgggtagaataagtcgcccgagtttaatgggcgaagaggagtatctaaacgattccttgctcagaccggcaagagaaaaaaatttcccaaacaatggaatagaaagtttggtggataaaatgagtagatggaagacttatgctcaggatcacagagacgagcctgggatcatggggattacaagtagagcgagccgtagacgccagcgccatgacagacagaggggtcttgtgtgggacgatgaggattcggccgatgatagcagcgtgctggacttgggtgggagaggaaggggcaacccgtttgctcatttgcgccctcgcttgggtggtatgttgtaaaaaaaaataaaaaaaaaactcaccaaggccatggcgacgagcgtacgttcgttcttctttattatctgtgtctagtataatgaggcgagtcgtgctaggcggagcggtggtgtatccggagggtcctcctccttcgtacgagagcgtgatgcagcagcagcaggcgacggcggtgatgcaatccccactggaggctccctttgtgcctccgcgatacctggcacctacggagggcagaaacagcattcgttattcggaactggcacctcagtacgataccaccaggttgtatctggtggacaacaagtcggcggacattgcttctctgaactatcagaatgaccacagcaacttcttgaccacggtggtgcaaaacaatgactttacccctacggaagccagcacccagaccattaactttgatgaacgatcgcggtggggcggtcagctaaagaccatcatgcatactaacatgccaaacgtgaacgagtatatgtttagtaacaagttcaaagcgcgtgtgatggtgtccagaaaacctcccgacggtgctgcagttggggatacttatgatcacaagcaggatattttgaaatatgagtggttcgagtttactttgccagaaggcaacttttcagttactatgactattgatttgatgaacaatgccatcatagataattacttgaaagtgggtagacagaatggagtgcttgaaagtgacattggtgttaagttcgacaccaggaacttcaagctgggatgggatcccgaaaccaagttgatcatgcctggagtgtatacgtatgaagccttccatcctgacattgtcttactgcctggctgcggagtggattttaccgagagtcgtttgagcaaccttcttggtatcagaaaaaaacagccatttcaagagggttttaagattttgtatgaagatttagaaggtggtaatattccggccctcttggatgtagatgcctatgagaacagtaagaaagaacaaaaagccaaaatagaagctgctacagctgctgcagaagctaaggcaaacatagttgccagcgactctacaagggttgctaacgctggagaggtcagaggagacaattttgcgccaacacctgttccgactgcagaatcattattggccgatgtgtctgaaggaacggacgtgaaactcactattcaacctgtagaaaaagatagtaagaatagaagctataatgtgttggaagacaaaatcaacacagcctatcgcagttggtatctttcgtacaattatggcgatcccgaaaaaggagtgcgttcctggacattgctcaccacctcagatgtcacctgcggagcagagcaggtctactggtcgcttccagacatgatgaaggatcctgtcactttccgctccactagacaagtcagtaactaccctgtggtgggtgcagagcttatgcccgtcttctcaaagagcttctacaacgaacaagctgtgtactcccagcagctccgccagtccacctcgcttacgcacgtcttcaaccgctttcctgagaaccagattttaatccgtccgccggcgcccaccattaccaccgtcagtgaaaacgttcctgctctcacagatcacgggaccctgccgttgcgcagcagtatccggggagtccaacgtgtgaccgttactgacgccagacgccgcacctgtccctacgtgtacaaggcactgggcatagtcgcaccgcgcgtcctttcaagccgcactttctaaaaaaaaaaaaaatgtccattcttatctcgcccagtaataacaccggttggggtctgcgcgctccaagcaagatgtacggaggcgcacgcaaacgttctacccaacatcctgtccgtgttcgcggacattttcgcgctccatggggcgccctcaagggccgcactcgcgttcgaaccaccgtcgatgatgtaatcgatcaggtggttgccgacgcccgtaattatactcctactgcgcctacatctactgtggatgcagttattgacagtgtagtggctgacgctcgcaactatgctcgacgtaagagccggcgaaggcgcattgccagacgccaccgagctaccactgccatgcgagccgcaagagctctgctacgaagagctagacgcgtggggcgaagagccatgcttagggcggccagacgtgcagcttcgggcgccagcgccggcaggtcccgcaggcaagcagccgctgtcgcagcggcgactattgccgacatggcccaatcgcgaagaggcaatgtatactgggtgcgtgacgctgccaccggtcaacgtgtacccgtgcgcacccgtccccctcgcacttagaagatactgagcagtctccgatgttgtgtcccagcggcgaggatgtccaagcgcaaatacaaggaagaaatgctgcaggttatcgcacctgaagtctacggccaaccgttgaaggatgaaaaaaaaccccgcaaaatcaagcgggttaaaaaggacaaaaaagaagaggaagatggcgatgatgggctggcggagtttgtgcgcgagtttgccccacggcgacgcgtgcaatggcgtgggcgcaaagttcgacatgtgttgagacctggaacttcggtggtctttacacccggcgagcgttcaagcgctacttttaagcgttcctatgatgaggtgtacggggatgatgatattcttgagcaggcggctgaccgattaggcgagtttgcttatggcaagcgtagtagaataacttccaaggatgagacagtgtcgatacccttggatcatggaaatcccacccctagtcttaaaccggtcactttgcagcaagtgttacccgtaactccgcgaacaggtgttaaacgcgaaggtgaagatttgtatcccactatgcaactgatggtacccaaacgccagaagttggaggacgttttggagaaagtaaaagtggatccagatattcaacctgaggttaaagtgagacccattaagcaggtagcgcctggtctgggggtacaaactgtagacattaagattcccactgaaagtatggaagtgcaaactgaacccgcaaagcctactgccacctccactgaagtgcaaacggatccatggatgcccatgcctattacaactgacgccgccggtcccactcgaagatcccgacgaaagtacggtccagcaagtctgttgatgcccaattatgttgtacacccatctattattcctactcctggttaccgaggcactcgctactatcgcagccgaaacagtacctcccgccgtcgccgcaagacacctgcaaatcgcagtcgtcgccgtagacgcacaagcaaaccgactcccggcgccctggtgcggcaagtgtaccgcaatggtagtgcggaacctttgacactgccgcgtgcgcgttaccatccgagtatcatcacttaatcaatgttgccgctgcctccttgcagatatggccctcacttgtcgccttcgcgttcccatcactggttaccgaggaagaaactcgcgccgtagaagagggatgttgggacgcggaatgcgacgctacaggcgacggcgtgctatccgcaagcaattgcggggtggttttttaccagccttaattccaattatcgctgctgcaattggcgcgataccaggcatagcttccgtggcggttcaggcctcgcaacgacattgacattggaaaaaaacgtataaataaaaaaaaaaaaatacaatggactctgacactcctggtcctgtgactatgttttcttagagatggaagacatcaatttttcatccttggctccgcgacacggcacgaagccgtacatgggcacctggagcgacatcggcacgagccaactgaacgggggcgccttcaattggagcagtatctggagcgggcttaaaaattttggctcaaccataaaaacatacgggaacaaagcttggaacagcagtacaggacaggcgcttagaaataaacttaaagaccagaacttccaacaaaaagtagtcgatgggatagcttccggcatcaatggagtggtagatttggctaaccaggctgtgcagaaaaagataaacagtcgtttggacccgccgccagcaaccccaggtgaaatgcaagtggaggaagaaattcctccgccagaaaaacgaggcgacaagcgtccgcgtcccgatttggaagagacgctggtgacgcgcgtagatgaaccgccttcttatgaggaagcaacgaagcttggaatgcccaccactagaccgatagccccaatggccaccggggtgatgaaaccttctcagttgcatcgacccgtcaccttggatttgccccctccccctgctgctactgctgtacccgcttctaagcctgtcgctgccccgaaaccagtcgccgtagccaggtcacgtcccgggggcgctcctcgtccaaatgcgcactggcaaaatactctgaacagcatcgtgggtctaggcgtgcaaagtgtaaaacgccgtcgctgcttttaattaaatatggagtagcgcttaacttgcctatctgtgtatatgtgtcattacacgccgtcacagcagcagaggaaaaaaggaagaggtcgtgcgtcgacgctgagttactttcaagatggccaccccatcgatgctgccccaatgggcatacatgcacatcgccggacaggatgcttcggagtacctgagtccgggtctggtgcagttcgcccgcgccacagacacctacttcaatctgggaaataagtttagaaatcccaccgtagcgccgacccacgatgtgaccaccgaccgtagccagcggctcatgttgcgcttcgtgcccgttgaccgggaggacaatacatactcttacaaagtgcggtacaccctggccgtgggcgacaacagagtgctggatatggccagcacgttctttgacattaggggtgtgttggacagaggtcccagtttcaaaccctattctggtacggcttacaactccctggctcctaaaggcgctccaaatacatctcagtggattgcagaaggtgtaaaaaatacaactggtgaggaacacgtaacagaagaggaaaccaatactactacttacacttttggcaatgctcctgtaaaagctgaagctgaaattacaaaagaaggactcccagtaggtttggaagtttcagatgaagaaagtaaaccgatttatgctgataaaacatatcagccagaacctcagctgggagatgaaacttggactgaccttgatggaaaaaccgaaaagtatggaggcagggctctcaaacccgatactaagatgaaaccatgctacgggtcctttgccaaacctactaatgtgaaaggcggtcaggcaaaacaaaaaacaacggagcagccaaatcagaaagtcgaatatgatatcgacatggagttttttgatgcggcatcgcagaaaacaaacttaagtcctaaaattgtcatgtatgcagaaaatgtaaatttggaaactccagacactcatgtagtgtacaaacctggaacagaagacacaagttccgaagctaatttgggacaacaatctatgcccaacagacccaactacattggcttcagagataactttattggacttatgtactataacagtactggtaacatgggggtgctggctggtcaagcgtctcagttaaatgcagtggttgacttgcaggacagaaacacagaactttcttaccaactcttgcttgactctctgggcgacagaaccagatactttagcatgtggaatcaggctgtggacagttatgatcctgatgtacgtgttattgaaaatcatggtgtggaagatgaacttcccaactactgttttccactggacggcataggtgttccaacaaccagttacaaatcaatagttccaaatggagacaatgcgcctaattggaaggaacctgaagtaaatggaacaagtgagatcggacagggtaatttgtttgccatggaaattaaccttcaagccaatctatggcgaagtttcctttattccaatgtggctctatatctcccagactcgtacaaatacaccccgtccaatgtcactcttccagaaaacaaaaacacctacgactacatgaacgggcgggtggtgccgccatctctagtagacacctatgtgaacattggtgccaggtggtctctggatgccatggacaatgtcaacccattcaaccaccaccgtaacgctggcttgcgttaccgatccatgcttctgggtaacggacgttatgtgcctttccacatacaagtgcctcaaaaattcttcgctgttaaaaacctgctgcttctcccaggctcctacacttatgagtggaactttaggaaggatgtgaacatggttctacagagttccctcggtaacgacctgcgggtagatggcgccagcatcagtttcacgagcatcaacctctatgctacttttttccccatggctcacaacaccgcttccacccttgaagccatgctgcggaatgacaccaatgatcagtcattcaacgactacctatctgcagctaacatgctctaccccattcctgccaatgcaaccaatattcccatttccattccttctcgcaactgggcggctttcagaggctggtcatttaccagactgaaaaccaaagaaactccctctttggggtctggatttgacccctactttgtctattctggttctattccctacctggatggtaccttctacctgaaccacacttttaagaaggtttccatcatgtttgactcttcagtgagctggcctggaaatgacaggttactatctcctaacgaatttgaaataaagcgcactgtggatggcgaaggctacaacgtagcccaatgcaacatgaccaaagactggttcttggtacagatgctcgccaactacaacatcggctatcagggcttctacattccagaaggatacaaagatcgcatgtattcatttttcagaaacttccagcccatgagcaggcaggtggttgatgaggtcaattacaaagacttcaaggccgtcgccataccctaccaacacaacaactctggctttgtgggttacatggctccgaccatgcgccaaggtcaaccctatcccgctaactatccctatccactcattggaacaactgccgtaaatagtgttacgcagaaaaagttcttgtgtgacagaaccatgtggcgcataccgttctcgagcaacttcatgtctatgggggcccttacagacttgggacagaatatgctctatgccaactcagctcatgctctggacatgacctttgaggtggatcccatggatgagcccaccctgctttatcttctcttcgaagttttcgacgtggtcagagtgcatcagccacaccgcggcatcatcgaggcagtctacctgcgtacaccgttctcggccggtaacgctaccacgtaagaagcttcttgcttcttgcaaatagcagctgcaaccatggcctgcggatcccaaaacggctccagcgagcaagagctcagagccattgtccaagacctgggttgcggaccctattttttgggaacctacgataagcgcttcccggggttcatggcccccgataagctcgcctgtgccattgtaaatacggccggacgtgagacggggggagagcactggttggctttcggttggaacccacgttctaacacctgctacctttttgatccttttggattctcggatgatcgtctcaaacagatttaccagtttgaatatgagggtctcctgcgccgcagcgctcttgctaccaaggaccgctgtattacgctggaaaaatctacccagaccgtgcagggtccccgttctgccgcctgcggacttttctgctgcatgttccttcacgcctttgtgcactggcctgaccgtcccatggacggaaaccccaccatgaaattgctaactggagtgccaaacaacatgcttcattctcctaaagtccagcccaccctgtgtgacaatcaaaaagcactctaccattttcttaatacccattcgccttattttcgctcccatcgtacacacatcgaaagggccactgcgttcgaccgtatggatgttcaataatgactcatgtaaacaacgtgttcaataaacatcactttatttttttacatgtatcaaggctctgcattacttatttatttacaagtcgaatgggttctgacgagaatcagaatgacccgcaggcagtgatacgttgcggaactgatacttgggttgccacttgaattcgggaatcaccaacttgggaaccggtatatcgggcaggatgtcactccacagctttctggtcagctgcaaagctccaagcaggtcaggagccgaaatcttgaaatcacaattaggaccagtgctttgagcgcgagagttgcggtacaccggattgcagcactgaaacaccatcagcgacggatgtctcacgcttgccagcacggtgggatctgcaatcatgcccacatccagatcttcagcattggcaatgctgaacggggtcatcttgcaggtctgcctacccatggcgggcacccaattaggcttgtggttgcaatcgcagtgcagggggatcagtatcatcttggcctgatcctgtctgattcctggatacacggctctcatgaaagcatcatattgcttgaaagcctgctgggctttactaccctcggtataaaacatcccgcaggacctgctcgaaaactggttagctgcacagccggcatcattcacacagcagcgggcgtcattgttagctatttgcaccacacttctgccccagcggttttgggtgattttggttcgctcgggattctcctttaaggctcgttgtccgttctcgctggccacatccatctcgataatctgctccttctgaatcataatattgccatgcaggcacttcagcttgccctcataatcattgcagccatgaggccacaacgcacagcctgtacattcccaattatggtgggcgatctgagaaaaagaatgtatcattccctgcagaaatcttcccatcatcgtgctcagtgtcttgtgactagtgaaagttaactggatgcctcggtgctcctcgtttacgtactggtgacagatgcgcttgtattgttcgtgttgctcaggcattagtttaaaagaggttctaagttcgttatccagcctgtacttctccatcagcagacacatcacttccatgcctttctcccaagcagacaccaggggcaagctaatcggattcttaacagtgcaggcagcagctcctttagccagagggtcatctttagcgatcttctcaatgcttcttttgccatccttctcaacgatgcgcacgggcgggtagctgaaacccactgctacaagttgcgcctcttctctttcttcttcgctgtcttgactgatgtcttgcatggggatatgtttggtcttccttggcttctttttggggggtatcggaggaggaggactgtcgctccgttccggagacagggaggattgtgacgtttcgctcaccattaccaactgactgtcggtagaagaacctgaccccacacggcgacaggtgtttctcttcgggggcagaggtggaggcgattgcgaagggctgcggtccgacctggaaggcggatgactggcagaaccccttccgcgttcgggggtgtgctccctgtggcggtcgcttaactgatttccttcgcggctggccattgtgttctcctaggcagagaaacaacagacatggaaactcagccattgctgtcaacatcgccacgagtgccatcacatctcgtcctcagcgacgaggaaaaggagcagagcttaagcattccaccgcccagtcctgccaccacctctaccctagaagataaggaggtcgacgcatctcatgacatgcagaataaaaaagcgaaagagtctgagacagacatcgagcaagacccgggctatgtgacaccggtggaacacgaggaagagttgaaacgctttctagagagagaggatgaaaactgcccaaaacaacgagcagataactatcaccaagatgctggaaatagggatcagaacaccgactacctcatagggcttgacggggaagacgcgctccttaaacatctagcaagacagtcgctcatagtcaaggatgcattattggacagaactgaagtgcccatcagtgtggaagagctcagccgcgcctacgagcttaacctcttttcacctcgtactccccccaaacgtcagccaaacggcacctgcgagccaaatcctcgcttaaacttttatccagcttttgctgtgccagaagtactggctacctatcacatcttttttaaaaatcaaaaaattccagtctcctgccgcgctaatcgcacccgcgccgatgccctactcaatctgggacctggttcacgcttacctgatatagcttccttggaagaggttccaaagatcttcgagggtctgggcaataatgagactcgggccgcaaatgctctgcaaaagggagaaaatggcatggatgagcatcacagcgttctggtggaattggaaggcgataatgccagactcgcagtactcaagcgaagcatcgaggtcacacacttcgcatatcccgctgtcaacctgccccctaaagtcatgacggcggtcatggaccagttactcattaagcgcgcaagtcccctttcagaagacatgcatgacccagatgcctgtgatgagggtaaaccagtggtcagtgatgagcagctaacccgatggctgggcaccgactctcccagggatttggaagagcgtcgcaagcttatgatggccgtggtgctggttaccgtagaactagagtgtctccgacgtttctttaccgattcagaaaccttgcgcaaactcgaagagaatctgcactacacttttagacacggctttgtgcggcaggcatgcaagatatctaacgtggaactcaccaacctggtttcctacatgggtattctgcatgagaatcgcctaggacaaagcgtgctgcacagcaccctgaagggggaagcccgccgtgattacatccgcgattgtgtctatctgtacctgtgccacacgtggcaaaccggcatgggtgtatggcagcaatgtttagaagaacagaacttgaaagagcttgacaagctcttacagaaatctcttaaggttctgtggacagggttcgacgagcgcaccgtcgcttccgacctggcagacctcatcttcccagagcgtctcagggttactttgcgaaacggattgcctgactttatgagccagagcatgcttaacaattttcgctctttcatcctggaacgctccggtatcctgcccgccacctgctgcgcactgccctccgactttgtgcctctcacctaccgcgagtgccccccgccgctatggagtcactgctacctgttccgtctggccaactatctctcctaccactcggatgtgatcgaggatgtgagcggagacggcttgctggagtgtcactgccgctgcaatctgtgcacgccccaccggtccctagcttgcaacccccagttgatgagcgaaacccagataataggcacctttgaattgcaaggccccagcagccaaggcgatgggtcttctcctgggcaaagtttaaaactgaccccgggactgtggacctccgcctacttgcgcaagtttgctccggaagattaccacccctatgaaatcaagttctatgaggaccaatcacagcctccaaaggccgaactttcggcctgcgtcatcacccagggggcaattctggcccaattgcaagccatccaaaaatcccgccaagaatttctactgaaaaagggtaagggggtctaccttgacccccagaccggcgaggaactcaacacaaggttccctcaggatgtcccaacgacgagaaaacaagaagttgaaggtgcagccgccgcccccagaagatatggaggaagattgggacagtcaggcagaggaggcggaggaggacagtctggaggacagtctggaggaagacagtttggaggaggaaaacgaggaggcagaggaggtggaagaagtaaccgccgacaaacagttatcctcggctgcggagacaagcaacagcgctaccatctccgctccgagtcgaggaacccggcggcgtcccagcagtagatgggacgagaccggacgcttcccgaacccaaccagcgcttccaagaccggtaagaaggatcggcagggatacaagtcctggcgggggcataagaatgccatcatctcctgcttgcatgagtgcgggggcaacatatccttcacgcggcgctacttgctattccaccatggggtgaactttccgcgcaatgttttgcattactaccgtcacctccacagcccctactatagccagcaaatcccggcagtctcgacagataaagacagcggcggcgacctccaacagaaaaccagcagcggcagttagaaaatacacaacaagtgcagcaacaggaggattaaagattacagccaacgagccagcgcaaacccgagagttaagaaatcggatctttccaaccctgtatgccatcttccagcagagtcggggtcaagagcaggaactgaaaataaaaaaccgatctctgcgttcgctcaccagaagttgtttgtatcacaagagcgaagatcaacttcagcgcactctcgaggacgccgaggctctcttcaacaagtactgcgcgctgactcttaaagagtaggcagcgaccgcgcttattcaaaaaaggcgggaattacatcatcctcgacatgagtaaagaaattcccacgccttacatgtggagttatcaaccccaaatgggattggcggcaggcgcctcccaggactactccacccgcatgaattggctcagcgccgggccttctatgatttctcgagttaatgatatacgcgcctaccgaaaccaaatacttttggaacagtcagctcttaccaccacgccccgccaacaccttaatcccagaaattggcccgccgccctagtgtaccaggaaagtcccgctcccaccactgtattacttcctcgagacgcccaggccgaagtccaaatgactaatgcaggtgcgcagttagctggcggctccaccctatgtcgtcacaggcctcggcataatataaaacgcctgatgatcagaggccgaggtatccagctcaacgacgagtcggtgagctctccgcttggtctacgaccagacggaatctttcagattgccggctgcgggagatcttccttcacccctcgtcaggctgttctgactttggaaagttcgtcttcgcaaccccgctcgggcggaatcgggaccgttcaatttgtggaggagtttactccctctgtctacttcaaccccttctccggatctcctgggcattacccggacgagttcataccgaacttcgacgcgattagcgagtcagtggacggctacgattgatgtctggtgacgcggctgagctatctcggctgcgacatctagaccactgccgccgctttcgctgctttgcccgggaactcattgagttcatctacttcgaactccccaaggatcaccctcaaggtccggcccacggagtgcggatttctatcgaaggcaaaatagactctcgcctgcaacgaattttctcccagcggcccgtgctgatcgagcgagaccagggaaacaccacggtttccatctactgcatttgtaatcaccccggattgcatgaaagcctttgctgtcttatgtgtactgagtttaataaaaactgaattaagactctcctacggactgccgcttcttcaacccggattttacaaccagaagaacgaaacttttcctgtcgtccaggactctgttaacttcacctttcctactcacaaactagaagctcaacgactacaccgcttttccagaagcattttccctactaatactactttcaaaaccggaggtgagctccaaggtcttcctacagaaaacccttgggtggaagcgggccttgtagtgctaggaattcttgcgggtgggcttgtgattattctttgctacctatacacaccttgcttcactttcttagtggtgttgtggtattggtttaaaaaatggggcccatactagtcttgcttgttttactttcgcttttggaaccgggttctgccaattacgatccatgtctagacttcgacccagaaaactgcacacttacttttgcacccgacacaagccgcatctgtggagttcatcgcctctcttacgaacttggcccccaacgacaaaaatttacctgcatggtgggaatcaaccccatagttatcacccagcaaagtggagatactaagggttgcattcactgctcctgcgattccatcgagtgcacctacaccctgctgaagaccctatgcggcctaagagacctgctaccaatgaattaaaaaatgattaataaaaaatcacttacttgaaatcagcaataaggtctctgttgaaattttctcccagcagcacctcacttccctcttcccaactctggtattctaaaccccgttcagcggcatactttctccatactttaaaggggatgtcaaattttagctcctctcctgtacccacaatcttcatgtctttcttcccagatgaccaagagagtccggctcagtgactccttcaaccctgtctacccctatgaagatgaaagcacctcccaacacccctttataaacccagggtttatttccccaaatggcttcacacaaagcccaaacggagttcttactttaaaatgtttaaccccactaacaaccacaggcggatctctacagctaaaagtgggagggggacttacagtggatgacaccaacggttttttgaaagaaaacataagtgccaccacaccactcgttaagactggtcactctataggtttaccactaggagccggattgggaacgaatgaaaataaactttgtatcaaattaggacaaggacttacattcaattcaaacaacatttgcattgatgacaatattaacaccttatggacaggagtcaaccccaccgaagccaactgtcaaatcatgaactccagtgaatctaatgattgcaaattaattctaacactagttaaaactggagcactagtcactgcatttgtttatgttataggagtatctaacaattttaatatgctaactacacacagaaatataaattttactgcagagctgtttttcgattctactggtaatttactaactagactctcatccctcaaaactccacttaatcataaatcaggacaaaacatggctactggtgccattactaatgctaaaggtttcatgcccagcacgactgcctatcctttcaatgataattctagagaaaaagaaaactacatttacggaacttgttactacacagctagtgatcgcactgcttttcccattgacatatctgtcatgcttaaccgaagagcaataaatgacgagacatcatattgtattcgtataacttggtcctggaacacaggagatgccccagaggtgcaaacctctgctacaaccctagtcacctccccatttaccttttactacatcagagaagacgactgacaaataaagtttgcgatcgccaggcccaccatggccttgacctttgctttactggtggccctcctggtgctcagctgcaagtcaagctgctctgtgggctgtgatctgcctcaaacccacagcctgggtagcaggaggaccttgatgctcctggcacagatgaggagaatctctcttttctcctgcttgaaggacagacatgactttggatttccccaggaggagtttggcaaccagttccaaaaggctgaaaccatccctgtcctccatgagatgatccagcagatcttcaatctcttcagcacaaaggactcatctgctgcttgggatgagaccctcctagacaaattctacactgaactctaccagcagctgaatgacctggaagcctgtgtgatacagggggtgggggtgacagagactcccctgatgaaggaggactccattctggctgtgaggaaatacttccaaagaatcactctctatctgaaagagaagaaatacagcccttgtgcctgggaggttgtcagagcagaaatcatgagatctttttctttgtcaacaaacttgcaagaaagtttaagaagtaaggaaggaagcggagctactaacttcagcctgctgaagcaggctggagacgtggaggagaaccctggaccttgtcaccagcagttggtcatctcttggttttccctggtttttctggcatctcccctcgtggccatatgggaactgaagaaagatgtttatgtcgtagaattggattggtatccggatgcccctggagaaatggtggtcctcacctgtgacacccctgaagaagatggtatcacctggaccttggaccagagcagtgaggtcttaggctctggcaaaaccctgaccatccaagtcaaagagtttggagatgctggccagtacacctgtcacaaaggaggcgaggttctaagccattcgctcctgctgcttcacaaaaaggaagatggaatttggtccactgatattttaaaggaccagaaagaacccaaaaataagacctttctaagatgcgaggccaagaattattctggacgtttcacctgctggtggctgacgacaatcagtactgatttgacattcagtgtcaaaagcagcagaggctcttctgacccccaaggggtgacgtgcggagctgctacactctctgcagagagagtcagaggggacaacaaggagtatgagtactcagtggagtgccaggaggacagtgcctgcccagctgctgaggagagtctgcccattgaggtcatggtggatgccgttcacaagctcaagtatgaaaactacaccagcagcttcttcatcagggacatcatcaaacctgacccacccaagaacttgcagctgaagccattaaagaattctcggcaggtggaggtcagctgggagtaccctgacacctggagtactccacattcctacttctccctgacattctgcgttcaggtccagggcaagagcaagagagaaaagaaagatagagtcttcacggacaagacctcagccacggtcatctgccgcaaaaatgccagcattagcgtgcgggcccaggaccgctactatagctcatcttggagcgaatgggcatctgtgccctgcagtggagggggcggcagcgggggaggcggcagcggcggcgggggatcgagaaacctccccgtggccactccagacccaggaatgttcccatgccttcaccactcccaaaacctgctgagggccgtcagcaacatgctccagaaggccagacaaactctagaattttacccttgcacttctgaagagattgatcatgaagatatcacaaaagataaaaccagcacagtggaggcctgtttaccattggaattaaccaagaatgagagttgcctaaattccagagagacctctttcataactaatgggagttgcctggcctccagaaagacctcttttatgatggccctgtgccttagtagtatttatgaagacttgaagatgtaccaggtggagttcaagaccatgaatgcaaagcttctgatggatcctaagaggcagatctttctagatcaaaacatgctggcagttattgatgagctgatgcaggccctgaatttcaacagtgagactgtgccacaaaaatcctcccttgaagaaccggatttttataaaactaaaatcaagctctgcatacttcttcatgctttcagaattcgggcagtgactattgatagagtgatgagctatctgaatgcttcctaagctagcttgactgactgagatacagcgtaccttcagctcacagacatgataagatacattgatgagtttggacaaaccacaactagaatgcagtgaaaaaaatgctttatttgtgaaatttgtgatgctattgctttatttgtaaccattataagctgcaataaacaagttaacaacaacaattgcattcattttatgtttcaggttcagggggaggtgtgggaggttttttaaagcaagtaaaacctctacaaatgtggtagtcgtcagctatcctgcaggaacttgtttatttgaaaatcaattcacaaaatccgagtagttattttgcctcccccttcccatttaacagaatacaccaatctctccccacgcacagctttaaacatttggataccattagatatagacatggttttagattccacattccaaacagtttcagagcgagccaatctggggtcagtgatagataaaaatccatcgggatagtcttttaaagcgctttcacagtccaactgctgcggatgcgactccggagtctggatcacggtcatctggaagaagaacgatgggaatcataatccgaaaacggtatcggacgattgtgtctcatcaaacccacaagcagccgctgtctgcgtcgctccgtgcgactgctgtttatgggatcagggtccacagtgtcctgaagcatgattttaatagcccttaacatcaactttctggtgcgatgcgcgcagcaacgcattctgatttcactcaaatctttgcagtaggtacaacacattattacaatattgtttaataaaccataattaaaagcgctccagccaaaactcatatctgatataatcgcccctgcatgaccatcataccaaagtttaatataaattaaatgacgttccctcaaaaacacactacccacatacatgatctcttttggcatgtgcatattaacaatctgtctgtaccatggacaacgttggttaatcatgcaacccaatataaccttccggaaccacactgccaacaccgctcccccagccatgcattgaagtgaaccctgctgattacaatgacaatgaagaacccaattctctcgaccgtgaatcacttgagaatgaaaaatatctatagtggcacaacatagacataaatgcatgcatcttctcataatttttaactcctcaggatttagaaacatatcccagggaataggaagctcttgcagaacagtaaagctggcagaacaaggaagaccacgaacacaacttacactatgcatagtcatagtatcacaatctggcaacagcgggtggtcttcagtcatagaagctcgggtttcattttcctcacaacgtggtaactgggctctggtgtaagggtgatgtctggcgcatgatgtcgagcgtgcgcgcaaccttgtcataatggagttgcttcctgacattctcgtattttgtatagcaaaacgcggccctggcagaacacactcttcttcgccttctatcctgccgcttagcgtgttccgtgtgatagttcaagtacaaccacactcttaagttggtcaaaagaatgctggcttcagttgtaatcaaaactccatcgcatctaatcgttctgaggaaatcatccaagcaatgcaactggattgtgtttcaagcaggagaggagagggaagagacggaagaaccatgttaatttttattccaaacgatctcgcagtacttcaaattgtagatcgcgcagatggcatctctcgcccccactgtgttggtgaaaaagcacagctagatcaaaagaaatgcgattttcaaggtgctcaacggtggcttccagcaaagcctccacgcgcacatccaagaacaaaagaataccaaaagaaggagcattttctaactcctcaatcatcatattacattcctgcaccattcccagataattttcagctttccagccttgaattattcgtgtcagttcttgtggtaaatccaatccacacattacaaacaggtcccggagggcgccctccaccaccattcttaaacacaccctcataatgacaaaatatcttgctcctgtgtcacctgtagcgaattgagaatggcaacatcaattgacatgcccttggctctaagttcttctttaagttctagttgtaaaaactctctcatattatcaccaaactgcttagccagaagccccccgggaacaagagcaggggacgctacagtgcagtacaagcgcagacctccccaattggctccagcaaaaacaagattggaataagcatattgggaaccgccagtaatatcatcgaagttgctggaaatataatcaggcagagtttcttgtaaaaattgaataaaagaaaaatttgccaaaaaaacattcaaaacctctgggatgcaaatgcaataggttaccgcgctgcgctccaacattgttagttttgaattagtctgcaaaaataaaaaaaaaaacaagcgtcatatcatagtagcctgacgaacagatggataaatcagtctttccatcacaagacaagccacagggtctccagctcgaccctcgtaaaacctgtcatcatgattaaacaacagcaccgaaagttcctcgcggtgaccagcatgaataattcttgatgaagcatacaatccagacatgttagcatcagttaacgagaaaaaacagccaacatagcctttgggtataattatgcttaatcgtaagtatagcaaagccacccctcgcggatacaaagtaaaaggcacaggagaataaaaaatataattatttctctgctgctgttcaggcaacgtcgcccccggtccctctaaatacacatacaaagcctcatcagccatggcttaccagacaaagtacagcgggcacacaaagcacaagctctaaagtgactctccaacctctccacaatatatatatacacaagccctaaactgacgtaatgggagtaaagtgtaaaaaatcccgccaaacccaacacacaccccgaaactgcgtcaccagggaaaagtacagtttcacttccgcaatcccaacaggcgtaacttcctctttctcacggtacgtgatatcccactaacttgcaacgtcattttcccacggtcgcaccgccccttttagccgttaaccccacagccaatcaccacacgatccacactttttaaaatcacctcatttacatattggcaccattccatctataaggtatattatatagataga

SEQ ID NO: 79 - DNA, 36268 bp, Artificial Sequence
  Genome sequence of NG-707 virus
tctatctatataatataccttatagatggaatggtgccaatatgtaaatgaggtgattttaaaaagtgtggatcgtgtggtgattggctgtggggttaacggctaaaaggggcggtgcgaccgtgggaaaatgacgttttgtgggggtggagtttttttgcaagttgtcgcgggaaatgtgacgcataaaaaggcttttttctcacggaactacttagttttcccacggtatttaacaggaaatgaggtagttttgaccggatgcaagtgaaaattgttgattttcgcgcgaaaactgaatgaggaagtgtttttctgaataatgtggtatttatggcagggtggagtatttgttcagggccaggtagactttgacccattacgtggaggtttcgattaccgtgttttttacctgaatttccgcgtaccgtgtcaaagtcttctgtttttacgtaggtgtcagctgatcgctagggtatttatacctcagggtttgtgtcaagaggccactcttgagtgccagcgagaagagttttctcctctgcgccggcagtttaataataaaaaaatgagagatttgcgatttctgcctcaggaaataatctctgctgagactggaaatgaaatattggagcttgtggtgcacgccctgatgggagacgatccggagccacctgtgcagctttttgagcctcctacgcttcaggaactgtatgatttagaggtagagggatcggaggattctaatgaggaagctgtaaatggcttttttaccgattctatgcttttagctgctaatgaagggttagaattagatccgcctttggacacttttgatactccaggggtaattgtggaaagcggtacaggtgtaagaaaattacctgatttgagttccgtggactgtgatttgcactgctatgaagacgggtttcctccgagtgatgaggaggaccatgaaaaggagcagtccatgcagactgcagcgggtgagggagtgaaggctgccaatgttggttttcagttggattgcccggagcttcctggacatggctgtaagtcttgtgaatttcacaggaaaaatactggagtaaaggaactgttatgttcgctttgttatatgagaacgcactgccactttatttacagtaagtgtgtttaagttaaaatttaaaggaatatgctgtttttcacatgtatattgagtgtgagttttgtgcttcttattataggtcctgtgtctgatgctgatgaatcaccatctcctgattctactacctcacctcctgagattcaagcacctgttcctgtggacgtgcgcaagcccattcctgtgaagcttaagcctgggaaacgtccagcagtggaaaaacttgaggacttgttacagggtggggacggacctttggacttgagtacacggaaacgtccaagacaataagtgttccatatccgtgtttacttaaggtgacgtcaatatttgtgtgacagtgcaatgtaataaaaatatgttaactgttcactggtttttattgctttttgggcggggactcaggtatataagtagaagcagacctgtgtggttagctcataggagctggctttcatccatggaggtttgggccattttggaagaccttaggaagactaggcaactgttagagaacgcttcggacggagtctccggtttttggagattctggttcgctagtgaattagctagggtagtttttaggataaaacaggactataaacaagaatttgaaaagttgttggtagattgcccaggactttttgaagctcttaatttgggccatcaggttcactttaaagaaaaagttttatcagttttagacttttcaaccccaggtagaactgctgctgctgtggcttttcttacttttatattagataaatggatcccgcagactcatttcagcaggggatacgttttggatttcatagccacagcattgtggagaacatggaaggttcgcaagatgaggacaatcttaggttactggccagtgcagcctttgggtgtagcgggaatcctgaggcatccaccggtcatgccagcggttctggaggaggaacagcaagaggacaacccgagagccggcctggaccctccagtggaggaggcggagtagctgacttgtctcctgaactgcaacgggtgcttactggatctacgtccactggacgggataggggcgttaagagggagagggcatctagtggtactgatgctagatctgagttggctttaagtttaatgagtcgcagacgtcctgaaaccatttggtggcatgaggttcagaaagagggaagggatgaagtttctgtattgcaggagaaatattcactggaacaggtgaaaacatgttggttggagcctgaggatgattgggaggtggccattaaaaattatgccaagatagctttgaggcctgataaacagtataagattactagacggattaatatccggaatgcttgttacatatctggaaatggggctgaggtggtaatagatactcaagacaaggcagttattagatgctgcatgatggatatgtggcctggggtagtcggtatggaagcagtaacttttgtaaatgttaagtttaggggagatggttataatggaatagtgtttatggccaataccaaacttatattgcatggttgtagcttttttggtttcaacaatacctgtgtagatgcctggggacaggttagtgtacggggatgtagtttctatgcgtgttggattgccacagctggcagaaccaagagtcaattgtctctgaagaaatgcatatttcaaagatgtaacctgggcattctgaatgaaggcgaagcaagggtccgccactgcgcttctacagatactggatgttttattttgattaagggaaatgccagcgtaaagcataacatgatttgcggtgcttccgatgagaggccttatcaaatgctcacttgtgctggtgggcattgtaatatgctggctactgtgcatattgtttcccatcaacgcaaaaaatggcctgtttttgatcacaatgtgatgacgaagtgtaccatgcatgcaggtgggcgtagaggaatgtttatgccttaccagtgtaacatgaatcatgtgaaagtgttgttggaaccagatgccttttccagaatgagcctaacaggaatttttgacatgaacatgcaaatctggaagatcctgaggtatgatgatacgagatcgagggtacgcgcatgcgaatgcggaggcaagcatgccaggttccagccggtgtgtgtagatgtgactgaagatctcagaccggatcatttggttattgcccgcactggagcagagttcggatccagtggagaagaaactgactaaggtgagtattgggaaaactttggggtgggattttcagatggacagattgagtaaaaatttgttttttctgtcttgcagctgtcatgagtggaaacgcttcttttaaggggggagtcttcagcccttatctgacagggcgtctcccatcctgggcaggagttcgtcagaatgttatgggatctactgtggatggaagacccgtccaacccgccaattcttcaacgctgacctatgctactttaagttcttcacctttggacgcagctgcagctgccgccgccgcttctgttgccgctaacactgtgcttggaatgggttactatggaagcatcatggctaattccacttcctctaataacccttctaccctgactcaggacaagttacttgtccttttggcccagctggaggctttgacccaacgtctgggtgaactttctcagcaggtggtcgagttgcgagtacaaactgagtctgctgtcggcacggcaaagtctaaataaaaaaatcccagaatcaatgaataaataaacaagcttgttgttgatttaaaatcaagtgtttttatttcatttttcgcgcacggtatgccctagaccaccgatctctatcattgagaactcggtggattttttccaggatcctatagaggtgggattgaatgtttagatacatgggcattaggccgtctttggggtggagatagctccattgaagggattcatgctccggggtagtgttgtaaatcacccagtcataacaaggtcgcagtgcatggtgttgcacaatatcttttagaagtaggctgattgccacagataagcccttggtgtaggtgtttacaaaccggttgagctgggatgggtgcattcggggtgaaattatgtgcattttggattggatttttaagttggcaatattgccgccaagatcccgtcttgggttcatgttatgaaggaccaccaagacggtgtatccggtacatttaggaaatttatcgtgcagcttggatggaaaagcgtggaaaaatttggagacacccttgtgtcctccaagattttccatgcactcatccatgataatagcaatggggccgtgggcagcggcgcgggcaaacacgttccgtgggtctgacacatcatagttatgttcctgagttaaatcatcataagccattttaatgaatttggggcggagagtaccagattggggtatgaatgttccttcgggccccggagcatagttcccctcacagatttgcatttcccaagctttcagttccgagggtggaatcatgtccacctggggggctatgaaaaacaccgtttctggggcgggggtgattaattgtgatgatagcaaatttctgagcaattgagatttgccacatccggtggggccataaatgattccgattacgggttgcaggtggtagtttagggaacggcaactgccgtcttctcgaagcaagggggccacctcgttcatcatttcccttacatgcatattttcccgcaccaaatccattaggaggcgctctcctcctagtgatagaagttcttgtagtgaggaaaagtttttcagcggtttcagaccgtcagccatgggcattttggagagagtttgctgcaaaagttctagtctgttccacagttcagtgatgtgttctatggcatctcgatccagcagacctcctcgtttcgcgggtttggacggctcctggaatagggtatgagacgatgggcgtccagcgctgccagggttcggtccttccagggtctcagtgttcgagtcagggttgtttccgtcacagtgaaggggtgtgcgcctgcttgggcgcttgccagggtgcgcttcagactcatcctgctggtcgaaaacttctgtcgcttggcgccctgtatgtcggccaagtagcagtttaccatgagttcgtagttgagcgcctcggctgcgtggcctttggcgcggagcttacctttggaagttttcttgcataccgggcagtataggcatttcagcgcatacaacttgggcgcaaggaaaacggattctggggagtatgcatctgcgccgcaggaggcgcaaacagtttcacattccaccagccaggttaaatccggttcattggggtcaaaaacaagttttccgccatattttttgatgcgtttcttacctttggtctccatgagttcgtgtcctcgttgagtgacaaacaggctgtccgtgtccccgtagactgattttacaggcctcttctccagtggagtgcctcggtcttcttcgtacaggaactctgaccactctgatacaaaggcgcgcgtccaggccagcacaaaggaggctatgtgggaggggtagcgatcgttgtcaaccagggggtccaccttttccaaagtatgcaaacacatgtcaccctcttcaacatccaggaatgtgattggcttgtaggtgtatttcacgtgacctggggtccccgctgggggggtataaaagggggcggttctttgctcttcctcactgtcttccggatcgctgtccaggaacgtcagctgttggggtaggtattccctctcgaaggcgggcatgacctctgcactcaggttgtcagtttctaagaacgaggaggatttgatattgacagtgccggttgagatgcctttcatgaggttttcgtccatctggtcagaaaacacaatttttttattgtcaagtttggtggcaaatgatccatacagggcgttggataaaagtttggcaatggatcgcatggtttggttcttttccttgtccgcgcgctctttggcggcgatgttgagttggacatactcgcgtgccaggcacttccattcggggaagatagttgttaattcatctggcacgattctcacttgccaccctcgattatgcaaggtaattaaatccacactggtggccacctcgcctcgaaggggttcattggtccaacagagcctacctcctttcctagaacagaaagggggaagtgggtctagcataagttcatcgggagggtctgcatccatggtaaagattcccggaagtaaatccttatcaaaatagctgatgggagtggggtcatctaaggccatttgccattctcgagctgccagtgcgcgctcatatgggttaaggggactgccccatggcatgggatgggtgagtgcagaggcatacatgccacagatgtcatagacgtagatgggatcctcaaagatgcctatgtaggttggatagcatcgcccccctctgatacttgctcgcacatagtcatatagttcatgtgatggcgctagcagccccggacccaagttggtgcgattgggtttttctgttctgtagacgatctggcgaaagatggcgtgagaattggaagagatggtgggtctttgaaaaatgttgaaatgggcatgaggtagacctacagagtctctgacaaagtgggcataagattcttgaagcttggttaccagttcggcggtgacaagtacgtctagggcgcagtagtcaagtgtttcttgaatgatgtcataacctggttggtttttcttttcccacagttcgcggttgagaaggtattcttcgcgatccttccagtactcttctagcggaaacccgtctttgtctgcacggtaagatcctagcatgtagaactgattaactgccttgtaagggcagcagcccttctctacgggtagagagtatgcttgagcagcttttcgtagcgaagcgtgagtaagggcaaaggtgtctctgaccatgactttgaggaattggtatttgaagtcgatgtcgtcacaggctccctgttcccagagttggaagtctacccgtttcttgtaggcggggttgggcaaagcgaaagtaacatcattgaagagaatcttgccggccctgggcatgaaattgcgagtgatgcgaaaaggctgtggtacttccgctcggttattgataacctgggcagctaggacgatctcgtcgaaaccgttgatgttgtgtcctacgatgtataattctatgaaacgcggcgtgcctctgacgtgaggtagcttactgagctcatcaaaggttaggtctgtggggtcagataaggcgtagtgttcgagagcccattcgtgcaggtgaggattcgctttaaggaaggaggaccagaggtccactgccagtgctgtttgtaactggtcccggtactgacgaaaatgccgtccgactgccattttttctggggtgacgcaatagaaggtttgggggtcctgccgccagcgatcccacttgagttttatggcgaggtcataggcgatgttgacgagccgctggtctccagagagtttcatgaccagcatgaaggggattagctgcttgccaaaggaccccatccaggtgtaggtttccacatcgtaggtgagaaagagcctttctgtgcgaggatgagagccaatcgggaagaactggatctcctgccaccagttggaggaatggctgttgatgtgatggaagtagaactccctgcgacgcgccgagcattcatgcttgtgcttgtacagacggccgcagtagtcgcagcgttgcacgggttgtatctcgtgaatgagttgtacctggcttcccttgacgagaaatttcagtgggaagccgaggcctggcgattgtatctcgtgctttactatgttgtctgcatcggcctgttcatcttctgtctcgatggtggtcatgctgacgagccctcgcgggaggcaagtccagacctcggcgcggcaggggcggagctcgaggacgagagcgcgcaggctggagctgtccagggtcctgagacgctgcggactcaggttagtaggcagtgtcaggagattaacttgcatgatcttttggagggcgtgcgggaggttcagatagtacttgatctcaacgggtccgttggtggagatgtcgatggcttgcagggttccgtgtcccttgggcgctaccaccgtgcccttgtttttcattttggacggcggtggctctgttgcttcttgcatgtttagaagcggtgtcgagggcgcgcaccgggcggcaggggcggctcgggacccggcggcatggctggcagtggtacgtcggcgccgcgcgcgggtaggttctggtactgcgccctgagaagactcgcatgcgcgacgacgcggcggttgacatcctggatctgacgcctctgggtgaaagctaccggccccgtgagcttgaacctgaaagagagttcaacagaatcaatctcggtatcgttgacggcggcttgcctaaggatttcttgcacgtcaccagagttgtcctggtaggcgatctccgccatgaactgctcgatctcttcctcttgaagatctccgcggcccgctctctcgacggtggccgcgaggtcgttggagatgcgcccaatgagttgagagaatgcattcatgcccgcctcgttccagacgcggctgtagaccacggcccccacgggatctctcgcgcgcatgaccacctgggcgaggttgagctccacgtggcgggtgaagaccgcatagttgcataggcgctggaaaaggtagttgagtgtggtggcgatgtgctcggtgacgaagaaatacatgatccatcgtctcagcggcatctcgctgacatcgcccagagcttccaagcgctccatggcctcgtagaagtccacggcaaaattaaaaaactgggagtttcgcgcggacacggtcaactcctcttccagaagacggataagttcggcgatggtggtgcgcacctcgcgctcgaaagcccctgggatttcttcctcaatctcttcttcttccactaacatctcttcctcttcaggtggggctgcaggaggagggggaacgcggcgacgccggcggcgcacgggcagacggtcgatgaatctttcaatgacctctccgcggcggcggcgcatggtttcagtgacggcgcggccgttctcgcgcggtcgcagagtaaaaacaccgccgcgcatctccttaaagtggtgactgggaggttctccgtttgggagggagagggcgctgattatacattttattaattggcccgtagggactgcacgcagagatctgatcgtgtcaagatccacgggatctgaaaacctttcgacgaaagcgtctaaccagtcacagtcacaaggtaggctgagtacggcttcttgtgggcgggggtggttatgtgttcggtctgggtcttctgtttcttcttcatctcgggaaggtgagacgatgctgctggtgatgaaattaaagtaggcagttctaagacggcggatggtggcgaggagcaccaggtctttgggtccggcttgctggatacgcaggcgattggccattccccaagcattatcctgacatctagcaagatctttgtagtagtcttgcatgagccgttctacgggcacttcttcctcacccgttctgccatgcatacgtgtgagtccaaatccgcgcattggttgtaccagtgccaagtcagctacgactctttcggcgaggatggcttgctgtacttgggtaagggtggcttgaaagtcatcaaaatccacaaagcggtggtaagctcctgtattaatggtgtaagcacagttggccatgactgaccagttaactgtctggtgaccagggcgcacgagctcggtgtatttaaggcgcgaataggcgcgggtgtcaaagatgtaatcgttgcaggtgcgcaccagatactggtaccctataagaaaatgcggcggtggttggcggtagagaggccatcgttctgtagctggagcgccaggggcgaggtcttccaacataaggcggtgatagccgtagatgtacctggacatccaggtgattcctgcggcggtagtagaagcccgaggaaactcgcgtacgcggttccaaatgttgcgtagcggcatgaagtagttcattgtaggcacggtttgaccagtgaggcgcgcgcagtcattgatgctctatagacacggagaaaatgaaagcgttcagcgactcgactccgtagcctggaggaacgtgaacgggttgggtcgcggtgtaccccggttcgagacttgtactcgagccggccggagccgcggctaacgtggtattggcactcccgtctcgacccagcctacaaaaatccaggatacggaatcgagtcgttttgctggtttccgaatggcagggaagtgagtcctattttttttttttgccgctcagatgcatcccgtgctgcgacagatgcgcccccaacaacagcccccctcgcagcagcagcagcagcaatcacaaaaggctgtccctgcaactactgcaactgccgccgtgagcggtgcgggacagcccgcctatgatctggacttggaagagggcgaaggactggcacgtctaggtgcgccttcacccgagcggcatccgcgagttcaactgaaaaaagattctcgcgaggcgtatgtgccccaacagaacctatttagagacagaagcggcgaggagccggaggagatgcgagcttcccgctttaacgcgggtcgtgagctgcgtcacggtttggaccgaagacgagtgttgcgggacgaggatttcgaagttgatgaaatgacagggatcagtcctgccagggcacacgtggctgcagccaaccttgtatcggcttacgagcagacagtaaaggaagagcgtaacttccaaaagtcttttaataatcatgtgcgaaccctgattgcccgcgaagaagttacccttggtttgatgcatttgtgggatttgatggaagctatcattcagaaccctactagcaaacctctgaccgcccagctgtttctggtggtgcaacacagcagagacaatgaggctttcagagaggcgctgctgaacatcaccgaacccgaggggagatggttgtatgatcttatcaacattctacagagtatcatagtgcaggagcggagcctgggcctggccgagaaggtggctgccatcaattactcggttttgagcttgggaaaatattacgctcgcaaaatctacaagactccatacgttcccatagacaaggaggtgaagatagatgggttctacatgcgcatgacgctcaaggtcttgaccctgagcgatgatcttggggtgtatcgcaatgacagaatgcatcgcgcggttagcgccagcaggaggcgcgagttaagcgacagggaactgatgcacagtttgcaaagagctctgactggagctggaaccgagggtgagaattacttcgacatgggagctgacttgcagtggcagcctagtcgcagggctctgagcgccgcgacggcaggatgtgagcttccttacatagaagaggcggatgaaggcgaggaggaagagggcgagtacttggaagactgatggcacaacccgtgttttttgctagatggaacagcaagcaccggatcccgcaatgcgggcggcgctgcagagccagccgtccggcattaactcctcggacgattggacccaggccatgcaacgtatcatggcgttgacgactcgcaaccccgaagcctttagacagcaaccccaggccaaccgtctatcggccatcatggaagctgtagtgccttcccgctctaatcccactcatgagaaggtcctggccatcgtgaacgcgttggtggagaacaaagctattcgtccagatgaggccggactggtatacaacgctctcttagaacgcgtggctcgctacaacagtagcaatgtgcaaaccaatttggaccgtatgataacagatgtacgcgaagccgtgtctcagcgcgaaaggttccagcgtgatgccaacctgggttcgctggtggcgttaaatgctttcttgagtactcagcctgctaatgtgccgcgtggtcaacaggattatactaactttttaagtgctttgagactgatggtatcagaagtacctcagagcgaagtgtatcagtccggtcctgattacttctttcagactagcagacagggcttgcagacggtaaatctgagccaagcttttaaaaaccttaaaggtttgtggggagtgcatgccccggtaggagaaagagcaaccgtgtctagcttgttaactccgaactcccgcctattattactgttggtagctcctttcaccgacagcggtagcatcgaccgtaattcctatttgggttacctactaaacctgtatcgcgaagccatagggcaaagtcaggtggacgagcagacctatcaagaaattacccaagtcagtcgcgctttgggacaggaagacactggcagtttggaagccactctgaacttcttgcttaccaatcggtctcaaaagatccctcctcaatatgctcttactgcggaggaggagaggatccttagatatgtgcagcagagcgtgggattgtttctgatgcaagagggggcaactccgactgcagcactggacatgacagcgcgaaatatggagcccagcatgtatgccagtaaccgacctttcattaacaaactgctggactacttgcacagagctgccgctatgaactctgattatttcaccaatgccatcttaaacccgcactggctgcccccacctggtttctacacgggcgaatatgacatgcccgaccctaatgacggatttctgtgggacgacgtggacagcgatgttttttcacctctttctgatcatcgcacgtggaaaaaggaaggcggcgatagaatgcattcttctgcatcgctgtccggggtcatgggtgctaccgcggctgagcccgagtctgcaagtccttttcctagtctacccttttctctacacagtgtacgtagcagcgaagtgggtagaataagtcgcccgagtttaatgggcgaagaggagtatctaaacgattccttgctcagaccggcaagagaaaaaaatttcccaaacaatggaatagaaagtttggtggataaaatgagtagatggaagacttatgctcaggatcacagagacgagcctgggatcatggggattacaagtagagcgagccgtagacgccagcgccatgacagacagaggggtcttgtgtgggacgatgaggattcggccgatgatagcagcgtgctggacttgggtgggagaggaaggggcaacccgtttgctcatttgcgccctcgcttgggtggtatgttgtaaaaaaaaataaaaaaaaaactcaccaaggccatggcgacgagcgtacgttcgttcttctttattatctgtgtctagtataatgaggcgagtcgtgctaggcggagcggtggtgtatccggagggtcctcctccttcgtacgagagcgtgatgcagcagcagcaggcgacggcggtgatgcaatccccactggaggctccctttgtgcctccgcgatacctggcacctacggagggcagaaacagcattcgttattcggaactggcacctcagtacgataccaccaggttgtatctggtggacaacaagtcggcggacattgcttctctgaactatcagaatgaccacagcaacttcttgaccacggtggtgcaaaacaatgactttacccctacggaagccagcacccagaccattaactttgatgaacgatcgcggtggggcggtcagctaaagaccatcatgcatactaacatgccaaacgtgaacgagtatatgtttagtaacaagttcaaagcgcgtgtgatggtgtccagaaaacctcccgacggtgctgcagttggggatacttatgatcacaagcaggatattttgaaatatgagtggttcgagtttactttgccagaaggcaacttttcagttactatgactattgatttgatgaacaatgccatcatagataattacttgaaagtgggtagacagaatggagtgcttgaaagtgacattggtgttaagttcgacaccaggaacttcaagctgggatgggatcccgaaaccaagttgatcatgcctggagtgtatacgtatgaagccttccatcctgacattgtcttactgcctggctgcggagtggattttaccgagagtcgtttgagcaaccttcttggtatcagaaaaaaacagccatttcaagagggttttaagattttgtatgaagatttagaaggtggtaatattccggccctcttggatgtagatgcctatgagaacagtaagaaagaacaaaaagccaaaatagaagctgctacagctgctgcagaagctaaggcaaacatagttgccagcgactctacaagggttgctaacgctggagaggtcagaggagacaattttgcgccaacacctgttccgactgcagaatcattattggccgatgtgtctgaaggaacggacgtgaaactcactattcaacctgtagaaaaagatagtaagaatagaagctataatgtgttggaagacaaaatcaacacagcctatcgcagttggtatctttcgtacaattatggcgatcccgaaaaaggagtgcgttcctggacattgctcaccacctcagatgtcacctgcggagcagagcaggtctactggtcgcttccagacatgatgaaggatcctgtcactttccgctccactagacaagtcagtaactaccctgtggtgggtgcagagcttatgcccgtcttctcaaagagcttctacaacgaacaagctgtgtactcccagcagctccgccagtccacctcgcttacgcacgtcttcaaccgctttcctgagaaccagattttaatccgtccgccggcgcccaccattaccaccgtcagtgaaaacgttcctgctctcacagatcacgggaccctgccgttgcgcagcagtatccggggagtccaacgtgtgaccgttactgacgccagacgccgcacctgtccctacgtgtacaaggcactgggcatagtcgcaccgcgcgtcctttcaagccgcactttctaaaaaaaaaaaaaatgtccattcttatctcgcccagtaataacaccggttggggtctgcgcgctccaagcaagatgtacggaggcgcacgcaaacgttctacccaacatcctgtccgtgttcgcggacattttcgcgctccatggggcgccctcaagggccgcactcgcgttcgaaccaccgtcgatgatgtaatcgatcaggtggttgccgacgcccgtaattatactcctactgcgcctacatctactgtggatgcagttattgacagtgtagtggctgacgctcgcaactatgctcgacgtaagagccggcgaaggcgcattgccagacgccaccgagctaccactgccatgcgagccgcaagagctctgctacgaagagctagacgcgtggggcgaagagccatgcttagggcggccagacgtgcagcttcgggcgccagcgccggcaggtcccgcaggcaagcagccgctgtcgcagcggcgactattgccgacatggcccaatcgcgaagaggcaatgtatactgggtgcgtgacgctgccaccggtcaacgtgtacccgtgcgcacccgtccccctcgcacttagaagatactgagcagtctccgatgttgtgtcccagcggcgaggatgtccaagcgcaaatacaaggaagaaatgctgcaggttatcgcacctgaagtctacggccaaccgttgaaggatgaaaaaaaaccccgcaaaatcaagcgggttaaaaaggacaaaaaagaagaggaagatggcgatgatgggctggcggagtttgtgcgcgagtttgccccacggcgacgcgtgcaatggcgtgggcgcaaagttcgacatgtgttgagacctggaacttcggtggtctttacacccggcgagcgttcaagcgctacttttaagcgttcctatgatgaggtgtacggggatgatgatattcttgagcaggcggctgaccgattaggcgagtttgcttatggcaagcgtagtagaataacttccaaggatgagacagtgtcgatacccttggatcatggaaatcccacccctagtcttaaaccggtcactttgcagcaagtgttacccgtaactccgcgaacaggtgttaaacgcgaaggtgaagatttgtatcccactatgcaactgatggtacccaaacgccagaagttggaggacgttttggagaaagtaaaagtggatccagatattcaacctgaggttaaagtgagacccattaagcaggtagcgcctggtctgggggtacaaactgtagacattaagattcccactgaaagtatggaagtgcaaactgaacccgcaaagcctactgccacctccactgaagtgcaaacggatccatggatgcccatgcctattacaactgacgccgccggtcccactcgaagatcccgacgaaagtacggtccagcaagtctgttgatgcccaattatgttgtacacccatctattattcctactcctggttaccgaggcactcgctactatcgcagccgaaacagtacctcccgccgtcgccgcaagacacctgcaaatcgcagtcgtcgccgtagacgcacaagcaaaccgactcccggcgccctggtgcggcaagtgtaccgcaatggtagtgcggaacctttgacactgccgcgtgcgcgttaccatccgagtatcatcacttaatcaatgttgccgctgcctccttgcagatatggccctcacttgtcgccttcgcgttcccatcactggttaccgaggaagaaactcgcgccgtagaagagggatgttgggacgcggaatgcgacgctacaggcgacggcgtgctatccgcaagcaattgcggggtggttttttaccagccttaattccaattatcgctgctgcaattggcgcgataccaggcatagcttccgtggcggttcaggcctcgcaacgacattgacattggaaaaaaacgtataaataaaaaaaaaaaaatacaatggactctgacactcctggtcctgtgactatgttttcttagagatggaagacatcaatttttcatccttggctccgcgacacggcacgaagccgtacatgggcacctggagcgacatcggcacgagccaactgaacgggggcgccttcaattggagcagtatctggagcgggcttaaaaattttggctcaaccataaaaacatacgggaacaaagcttggaacagcagtacaggacaggcgcttagaaataaacttaaagaccagaacttccaacaaaaagtagtcgatgggatagcttccggcatcaatggagtggtagatttggctaaccaggctgtgcagaaaaagataaacagtcgtttggacccgccgccagcaaccccaggtgaaatgcaagtggaggaagaaattcctccgccagaaaaacgaggcgacaagcgtccgcgtcccgatttggaagagacgctggtgacgcgcgtagatgaaccgccttcttatgaggaagcaacgaagcttggaatgcccaccactagaccgatagccccaatggccaccggggtgatgaaaccttctcagttgcatcgacccgtcaccttggatttgccccctccccctgctgctactgctgtacccgcttctaagcctgtcgctgccccgaaaccagtcgccgtagccaggtcacgtcccgggggcgctcctcgtccaaatgcgcactggcaaaatactctgaacagcatcgtgggtctaggcgtgcaaagtgtaaaacgccgtcgctgcttttaattaaatatggagtagcgcttaacttgcctatctgtgtatatgtgtcattacacgccgtcacagcagcagaggaaaaaaggaagaggtcgtgcgtcgacgctgagttactttcaagatggccaccccatcgatgctgccccaatgggcatacatgcacatcgccggacaggatgcttcggagtacctgagtccgggtctggtgcagttcgcccgcgccacagacacctacttcaatctgggaaataagtttagaaatcccaccgtagcgccgacccacgatgtgaccaccgaccgtagccagcggctcatgttgcgcttcgtgcccgttgaccgggaggacaatacatactcttacaaagtgcggtacaccctggccgtgggcgacaacagagtgctggatatggccagcacgttctttgacattaggggtgtgttggacagaggtcccagtttcaaaccctattctggtacggcttacaactccctggctcctaaaggcgctccaaatacatctcagtggattgcagaaggtgtaaaaaatacaactggtgaggaacacgtaacagaagaggaaaccaatactactacttacacttttggcaatgctcctgtaaaagctgaagctgaaattacaaaagaaggactcccagtaggtttggaagtttcagatgaagaaagtaaaccgatttatgctgataaaacatatcagccagaacctcagctgggagatgaaacttggactgaccttgatggaaaaaccgaaaagtatggaggcagggctctcaaacccgatactaagatgaaaccatgctacgggtcctttgccaaacctactaatgtgaaaggcggtcaggcaaaacaaaaaacaacggagcagccaaatcagaaagtcgaatatgatatcgacatggagttttttgatgcggcatcgcagaaaacaaacttaagtcctaaaattgtcatgtatgcagaaaatgtaaatttggaaactccagacactcatgtagtgtacaaacctggaacagaagacacaagttccgaagctaatttgggacaacaatctatgcccaacagacccaactacattggcttcagagataactttattggacttatgtactataacagtactggtaacatgggggtgctggctggtcaagcgtctcagttaaatgcagtggttgacttgcaggacagaaacacagaactttcttaccaactcttgcttgactctctgggcgacagaaccagatactttagcatgtggaatcaggctgtggacagttatgatcctgatgtacgtgttattgaaaatcatggtgtggaagatgaacttcccaactactgttttccactggacggcataggtgttccaacaaccagttacaaatcaatagttccaaatggagacaatgcgcctaattggaaggaacctgaagtaaatggaacaagtgagatcggacagggtaatttgtttgccatggaaattaaccttcaagccaatctatggcgaagtttcctttattccaatgtggctctatatctcccagactcgtacaaatacaccccgtccaatgtcactcttccagaaaacaaaaacacctacgactacatgaacgggcgggtggtgccgccatctctagtagacacctatgtgaacattggtgccaggtggtctctggatgccatggacaatgtcaacccattcaaccaccaccgtaacgctggcttgcgttaccgatccatgcttctgggtaacggacgttatgtgcctttccacatacaagtgcctcaaaaattcttcgctgttaaaaacctgctgcttctcccaggctcctacacttatgagtggaactttaggaaggatgtgaacatggttctacagagttccctcggtaacgacctgcgggtagatggcgccagcatcagtttcacgagcatcaacctctatgctacttttttccccatggctcacaacaccgcttccacccttgaagccatgctgcggaatgacaccaatgatcagtcattcaacgactacctatctgcagctaacatgctctaccccattcctgccaatgcaaccaatattcccatttccattccttctcgcaactgggcggctttcagaggctggtcatttaccagactgaaaaccaaagaaactccctctttggggtctggatttgacccctactttgtctattctggttctattccctacctggatggtaccttctacctgaaccacacttttaagaaggtttccatcatgtttgactcttcagtgagctggcctggaaatgacaggttactatctcctaacgaatttgaaataaagcgcactgtggatggcgaaggctacaacgtagcccaatgcaacatgaccaaagactggttcttggtacagatgctcgccaactacaacatcggctatcagggcttctacattccagaaggatacaaagatcgcatgtattcatttttcagaaacttccagcccatgagcaggcaggtggttgatgaggtcaattacaaagacttcaaggccgtcgccataccctaccaacacaacaactctggctttgtgggttacatggctccgaccatgcgccaaggtcaaccctatcccgctaactatccctatccactcattggaacaactgccgtaaatagtgttacgcagaaaaagttcttgtgtgacagaaccatgtggcgcataccgttctcgagcaacttcatgtctatgggggcccttacagacttgggacagaatatgctctatgccaactcagctcatgctctggacatgacctttgaggtggatcccatggatgagcccaccctgctttatcttctcttcgaagttttcgacgtggtcagagtgcatcagccacaccgcggcatcatcgaggcagtctacctgcgtacaccgttctcggccggtaacgctaccacgtaagaagcttcttgcttcttgcaaatagcagctgcaaccatggcctgcggatcccaaaacggctccagcgagcaagagctcagagccattgtccaagacctgggttgcggaccctattttttgggaacctacgataagcgcttcccggggttcatggcccccgataagctcgcctgtgccattgtaaatacggccggacgtgagacggggggagagcactggttggctttcggttggaacccacgttctaacacctgctacctttttgatccttttggattctcggatgatcgtctcaaacagatttaccagtttgaatatgagggtctcctgcgccgcagcgctcttgctaccaaggaccgctgtattacgctggaaaaatctacccagaccgtgcagggtccccgttctgccgcctgcggacttttctgctgcatgttccttcacgcctttgtgcactggcctgaccgtcccatggacggaaaccccaccatgaaattgctaactggagtgccaaacaacatgcttcattctcctaaagtccagcccaccctgtgtgacaatcaaaaagcactctaccattttcttaatacccattcgccttattttcgctcccatcgtacacacatcgaaagggccactgcgttcgaccgtatggatgttcaataatgactcatgtaaacaacgtgttcaataaacatcactttatttttttacatgtatcaaggctctgcattacttatttatttacaagtcgaatgggttctgacgagaatcagaatgacccgcaggcagtgatacgttgcggaactgatacttgggttgccacttgaattcgggaatcaccaacttgggaaccggtatatcgggcaggatgtcactccacagctttctggtcagctgcaaagctccaagcaggtcaggagccgaaatcttgaaatcacaattaggaccagtgctttgagcgcgagagttgcggtacaccggattgcagcactgaaacaccatcagcgacggatgtctcacgcttgccagcacggtgggatctgcaatcatgcccacatccagatcttcagcattggcaatgctgaacggggtcatcttgcaggtctgcctacccatggcgggcacccaattaggcttgtggttgcaatcgcagtgcagggggatcagtatcatcttggcctgatcctgtctgattcctggatacacggctctcatgaaagcatcatattgcttgaaagcctgctgggctttactaccctcggtataaaacatcccgcaggacctgctcgaaaactggttagctgcacagccggcatcattcacacagcagcgggcgtcattgttagctatttgcaccacacttctgccccagcggttttgggtgattttggttcgctcgggattctcctttaaggctcgttgtccgttctcgctggccacatccatctcgataatctgctccttctgaatcataatattgccatgcaggcacttcagcttgccctcataatcattgcagccatgaggccacaacgcacagcctgtacattcccaattatggtgggcgatctgagaaaaagaatgtatcattccctgcagaaatcttcccatcatcgtgctcagtgtcttgtgactagtgaaagttaactggatgcctcggtgctcctcgtttacgtactggtgacagatgcgcttgtattgttcgtgttgctcaggcattagtttaaaagaggttctaagttcgttatccagcctgtacttctccatcagcagacacatcacttccatgcctttctcccaagcagacaccaggggcaagctaatcggattcttaacagtgcaggcagcagctcctttagccagagggtcatctttagcgatcttctcaatgcttcttttgccatccttctcaacgatgcgcacgggcgggtagctgaaacccactgctacaagttgcgcctcttctctttcttcttcgctgtcttgactgatgtcttgcatggggatatgtttggtcttccttggcttctttttggggggtatcggaggaggaggactgtcgctccgttccggagacagggaggattgtgacgtttcgctcaccattaccaactgactgtcggtagaagaacctgaccccacacggcgacaggtgtttctcttcgggggcagaggtggaggcgattgcgaagggctgcggtccgacctggaaggcggatgactggcagaaccccttccgcgttcgggggtgtgctccctgtggcggtcgcttaactgatttccttcgcggctggccattgtgttctcctaggcagagaaacaacagacatggaaactcagccattgctgtcaacatcgccacgagtgccatcacatctcgtcctcagcgacgaggaaaaggagcagagcttaagcattccaccgcccagtcctgccaccacctctaccctagaagataaggaggtcgacgcatctcatgacatgcagaataaaaaagcgaaagagtctgagacagacatcgagcaagacccgggctatgtgacaccggtggaacacgaggaagagttgaaacgctttctagagagagaggatgaaaactgcccaaaacaacgagcagataactatcaccaagatgctggaaatagggatcagaacaccgactacctcatagggcttgacggggaagacgcgctccttaaacatctagcaagacagtcgctcatagtcaaggatgcattattggacagaactgaagtgcccatcagtgtggaagagctcagccgcgcctacgagcttaacctcttttcacctcgtactccccccaaacgtcagccaaacggcacctgcgagccaaatcctcgcttaaacttttatccagcttttgctgtgccagaagtactggctacctatcacatcttttttaaaaatcaaaaaattccagtctcctgccgcgctaatcgcacccgcgccgatgccctactcaatctgggacctggttcacgcttacctgatatagcttccttggaagaggttccaaagatcttcgagggtctgggcaataatgagactcgggccgcaaatgctctgcaaaagggagaaaatggcatggatgagcatcacagcgttctggtggaattggaaggcgataatgccagactcgcagtactcaagcgaagcatcgaggtcacacacttcgcatatcccgctgtcaacctgccccctaaagtcatgacggcggtcatggaccagttactcattaagcgcgcaagtcccctttcagaagacatgcatgacccagatgcctgtgatgagggtaaaccagtggtcagtgatgagcagctaacccgatggctgggcaccgactctcccagggatttggaagagcgtcgcaagcttatgatggccgtggtgctggttaccgtagaactagagtgtctccgacgtttctttaccgattcagaaaccttgcgcaaactcgaagagaatctgcactacacttttagacacggctttgtgcggcaggcatgcaagatatctaacgtggaactcaccaacctggtttcctacatgggtattctgcatgagaatcgcctaggacaaagcgtgctgcacagcaccctgaagggggaagcccgccgtgattacatccgcgattgtgtctatctgtacctgtgccacacgtggcaaaccggcatgggtgtatggcagcaatgtttagaagaacagaacttgaaagagcttgacaagctcttacagaaatctcttaaggttctgtggacagggttcgacgagcgcaccgtcgcttccgacctggcagacctcatcttcccagagcgtctcagggttactttgcgaaacggattgcctgactttatgagccagagcatgcttaacaattttcgctctttcatcctggaacgctccggtatcctgcccgccacctgctgcgcactgccctccgactttgtgcctctcacctaccgcgagtgccccccgccgctatggagtcactgctacctgttccgtctggccaactatctctcctaccactcggatgtgatcgaggatgtgagcggagacggcttgctggagtgtcactgccgctgcaatctgtgcacgccccaccggtccctagcttgcaacccccagttgatgagcgaaacccagataataggcacctttgaattgcaaggccccagcagccaaggcgatgggtcttctcctgggcaaagtttaaaactgaccccgggactgtggacctccgcctacttgcgcaagtttgctccggaagattaccacccctatgaaatcaagttctatgaggaccaatcacagcctccaaaggccgaactttcggcctgcgtcatcacccagggggcaattctggcccaattgcaagccatccaaaaatcccgccaagaatttctactgaaaaagggtaagggggtctaccttgacccccagaccggcgaggaactcaacacaaggttccctcaggatgtcccaacgacgagaaaacaagaagttgaaggtgcagccgccgcccccagaagatatggaggaagattgggacagtcaggcagaggaggcggaggaggacagtctggaggacagtctggaggaagacagtttggaggaggaaaacgaggaggcagaggaggtggaagaagtaaccgccgacaaacagttatcctcggctgcggagacaagcaacagcgctaccatctccgctccgagtcgaggaacccggcggcgtcccagcagtagatgggacgagaccggacgcttcccgaacccaaccagcgcttccaagaccggtaagaaggatcggcagggatacaagtcctggcgggggcataagaatgccatcatctcctgcttgcatgagtgcgggggcaacatatccttcacgcggcgctacttgctattccaccatggggtgaactttccgcgcaatgttttgcattactaccgtcacctccacagcccctactatagccagcaaatcccggcagtctcgacagataaagacagcggcggcgacctccaacagaaaaccagcagcggcagttagaaaatacacaacaagtgcagcaacaggaggattaaagattacagccaacgagccagcgcaaacccgagagttaagaaatcggatctttccaaccctgtatgccatcttccagcagagtcggggtcaagagcaggaactgaaaataaaaaaccgatctctgcgttcgctcaccagaagttgtttgtatcacaagagcgaagatcaacttcagcgcactctcgaggacgccgaggctctcttcaacaagtactgcgcgctgactcttaaagagtaggcagcgaccgcgcttattcaaaaaaggcgggaattacatcatcctcgacatgagtaaagaaattcccacgccttacatgtggagttatcaaccccaaatgggattggcggcaggcgcctcccaggactactccacccgcatgaattggctcagcgccgggccttctatgatttctcgagttaatgatatacgcgcctaccgaaaccaaatacttttggaacagtcagctcttaccaccacgccccgccaacaccttaatcccagaaattggcccgccgccctagtgtaccaggaaagtcccgctcccaccactgtattacttcctcgagacgcccaggccgaagtccaaatgactaatgcaggtgcgcagttagctggcggctccaccctatgtcgtcacaggcctcggcataatataaaacgcctgatgatcagaggccgaggtatccagctcaacgacgagtcggtgagctctccgcttggtctacgaccagacggaatctttcagattgccggctgcgggagatcttccttcacccctcgtcaggctgttctgactttggaaagttcgtcttcgcaaccccgctcgggcggaatcgggaccgttcaatttgtggaggagtttactccctctgtctacttcaaccccttctccggatctcctgggcattacccggacgagttcataccgaacttcgacgcgattagcgagtcagtggacggctacgattgatgtctggtgacgcggctgagctatctcggctgcgacatctagaccactgccgccgctttcgctgctttgcccgggaactcattgagttcatctacttcgaactccccaaggatcaccctcaaggtccggcccacggagtgcggatttctatcgaaggcaaaatagactctcgcctgcaacgaattttctcccagcggcccgtgctgatcgagcgagaccagggaaacaccacggtttccatctactgcatttgtaatcaccccggattgcatgaaagcctttgctgtcttatgtgtactgagtttaataaaaactgaattaagactctcctacggactgccgcttcttcaacccggattttacaaccagaagaacgaaacttttcctgtcgtccaggactctgttaacttcacctttcctactcacaaactagaagctcaacgactacaccgcttttccagaagcattttccctactaatactactttcaaaaccggaggtgagctccaaggtcttcctacagaaaacccttgggtggaagcgggccttgtagtgctaggaattcttgcgggtgggcttgtgattattctttgctacctatacacaccttgcttcactttcttagtggtgttgtggtattggtttaaaaaatggggcccatactagtcttgcttgttttactttcgcttttggaaccgggttctgccaattacgatccatgtctagacttcgacccagaaaactgcacacttacttttgcacccgacacaagccgcatctgtggagttcatcgcctctcttacgaacttggcccccaacgacaaaaatttacctgcatggtgggaatcaaccccatagttatcacccagcaaagtggagatactaagggttgcattcactgctcctgcgattccatcgagtgcacctacaccctgctgaagaccctatgcggcctaagagacctgctaccaatgaattaaaaaatgattaataaaaaatcacttacttgaaatcagcaataaggtctctgttgaaattttctcccagcagcacctcacttccctcttcccaactctggtattctaaaccccgttcagcggcatactttctccatactttaaaggggatgtcaaattttagctcctctcctgtacccacaatcttcatgtctttcttcccagatgaccaagagagtccggctcagtgactccttcaaccctgtctacccctatgaagatgaaagcacctcccaacacccctttataaacccagggtttatttccccaaatggcttcacacaaagcccaaacggagttcttactttaaaatgtttaaccccactaacaaccacaggcggatctctacagctaaaagtgggagggggacttacagtggatgacaccaacggttttttgaaagaaaacataagtgccaccacaccactcgttaagactggtcactctataggtttaccactaggagccggattgggaacgaatgaaaataaactttgtatcaaattaggacaaggacttacattcaattcaaacaacatttgcattgatgacaatattaacaccttatggacaggagtcaaccccaccgaagccaactgtcaaatcatgaactccagtgaatctaatgattgcaaattaattctaacactagttaaaactggagcactagtcactgcatttgtttatgttataggagtatctaacaattttaatatgctaactacacacagaaatataaattttactgcagagctgtttttcgattctactggtaatttactaactagactctcatccctcaaaactccacttaatcataaatcaggacaaaacatggctactggtgccattactaatgctaaaggtttcatgcccagcacgactgcctatcctttcaatgataattctagagaaaaagaaaactacatttacggaacttgttactacacagctagtgatcgcactgcttttcccattgacatatctgtcatgcttaaccgaagagcaataaatgacgagacatcatattgtattcgtataacttggtcctggaacacaggagatgccccagaggtgcaaacctctgctacaaccctagtcacctccccatttaccttttactacatcagagaagacgactgacaaataaagtttgcgatcgccaggcccaccatgacagtgctggcgccagcctggagcccaacaacctatctcctcctgctgctgctgctgagctcgggactcagtgggacccaggactgctccttccaacacagccccatctcctccgacttcgctgtcaaaatccgtgagctgtctgactacctgcttcaagattacccagtcaccgtggcctccaacctccaggacgaggagctctgcgggggcctctggcggctggtcctggcacagcgctggatggagcggctcaagactgtcgctgggtccaagatgcaaggcttgctggagcgcgtgaacacggagatacactttgtcaccaaatgtgcctttcagcccccccccagctgtcttcgcttcgtccagaccaacatctcccgcctcctacaggagacctccgagcagctggtggcgctgaagccctggatcactcgccagaacttctcccggtgcctggagctgcagtgtcagcccgactcctcaaccctgccacccccatggagtccccggcccctggaggccacagccccgggaagcggagctactaacttcagcctgctgaagcaggctggagacgtggaggagaaccctggacctcaggtctccactgctgcccttgccgtcctcctctgcaccatggctctctgcaaccaggtcctctctgcaccacttgctgctgacacgccgaccgcctgctgcttcagctacacctcccgacagattccacagaatttcatagctgactactttgagacgagcagccagtgctccaagcccagtgtcatcttcctaaccaagagaggccggcaggtctgtgctgaccccagtgaggagtgggtccagaaatacgtcagtgacctggagctgagtgccggaagcggagagggcagaggaagtctgctaacatgcggtgacgtcgaggagaatcctggacctgccttgacctttgctttactggtggccctcctggtgctcagctgcaagtcaagctgctctgtgggctgtgatctgcctcaaacccacagcctgggtagcaggaggaccttgatgctcctggcacagatgaggagaatctctcttttctcctgcttgaaggacagacatgactttggatttccccaggaggagtttggcaaccagttccaaaaggctgaaaccatccctgtcctccatgagatgatccagcagatcttcaatctcttcagcacaaaggactcatctgctgcttgggatgagaccctcctagacaaattctacactgaactctaccagcagctgaatgacctggaagcctgtgtgatacagggggtgggggtgacagagactcccctgatgaaggaggactccattctggctgtgaggaaatacttccaaagaatcactctctatctgaaagagaagaaatacagcccttgtgcctgggaggttgtcagagcagaaatcatgagatctttttctttgtcaacaaacttgcaagaaagtttaagaagtaaggaaggaagcggacagtgtactaattatgctctcttgaaattggctggagatgttgagagcaaccctggacctaagaaaagtggtgttcttttcctcttgggcatcatcttgctggttctgattggagtgcaaggaaccccagtagtgagaaagggtcgctgttcctgcatcagcaccaaccaagggactatccacctacaatccttgaaagaccttaaacaatttgccccaagcccttcctgcgagaaaattgaaatcattgctacactgaagaatggagttcaaacatgtctaaacccagattcagcagatgtgaaggaactgattaaaaagtgggagaaacaggtcagccaaaagaaaaagcaaaagaatgggaaaaaacatcaaaaaaagaaagttctgaaagttcgaaaatctcaacgttctcgtcaaaagaagactacaggaagcggagtgaaacagactttgaattttgaccttctcaagttggcgggagacgtggagtccaaccctggacctatgtgtcaccagcagttggtcatctcttggttttccctggtttttctggcatctcccctcgtggccatatgggaactgaagaaagatgtttatgtcgtagaattggattggtatccggatgcccctggagaaatggtggtcctcacctgtgacacccctgaagaagatggtatcacctggaccttggaccagagcagtgaggtcttaggctctggcaaaaccctgaccatccaagtcaaagagtttggagatgctggccagtacacctgtcacaaaggaggcgaggttctaagccattcgctcctgctgcttcacaaaaaggaagatggaatttggtccactgatattttaaaggaccagaaagaacccaaaaataagacctttctaagatgcgaggccaagaattattctggacgtttcacctgctggtggctgacgacaatcagtactgatttgacattcagtgtcaaaagcagcagaggctcttctgacccccaaggggtgacgtgcggagctgctacactctctgcagagagagtcagaggggacaacaaggagtatgagtactcagtggagtgccaggaggacagtgcctgcccagctgctgaggagagtctgcccattgaggtcatggtggatgccgttcacaagctcaagtatgaaaactacaccagcagcttcttcatcagggacatcatcaaacctgacccacccaagaacttgcagctgaagccattaaagaattctcggcaggtggaggtcagctgggagtaccctgacacctggagtactccacattcctacttctccctgacattctgcgttcaggtccagggcaagagcaagagagaaaagaaagatagagtcttcacggacaagacctcagccacggtcatctgccgcaaaaatgccagcattagcgtgcgggcccaggaccgctactatagctcatcttggagcgaatgggcatctgtgccctgcagtggagggggcggcagcgggggaggcggcagcggcggcgggggatcgagaaacctccccgtggccactccagacccaggaatgttcccatgccttcaccactcccaaaacctgctgagggccgtcagcaacatgctccagaaggccagacaaactctagaattttacccttgcacttctgaagagattgatcatgaagatatcacaaaagataaaaccagcacagtggaggcctgtttaccattggaattaaccaagaatgagagttgcctaaattccagagagacctctttcataactaatgggagttgcctggcctccagaaagacctcttttatgatggccctgtgccttagtagtatttatgaagacttgaagatgtaccaggtggagttcaagaccatgaatgcaaagcttctgatggatcctaagaggcagatctttctagatcaaaacatgctggcagttattgatgagctgatgcaggccctgaatttcaacagtgagactgtgccacaaaaatcctcccttgaagaaccggatttttataaaactaaaatcaagctctgcatacttcttcatgctttcagaattcgggcagtgactattgatagagtgatgagctatctgaatgcttcctaagctagcttgactgactgagatacagcgtaccttcagctcacagacatgataagatacattgatgagtttggacaaaccacaactagaatgcagtgaaaaaaatgctttatttgtgaaatttgtgatgctattgctttatttgtaaccattataagctgcaataaacaagttaacaacaacaattgcattcattttatgtttcaggttcagggggaggtgtgggaggttttttaaagcaagtaaaacctctacaaatgtggtagtcgtcagctatcctgcaggaacttgtttatttgaaaatcaattcacaaaatccgagtagttattttgcctcccccttcccatttaacagaatacaccaatctctccccacgcacagctttaaacatttggataccattagatatagacatggttttagattccacattccaaacagtttcagagcgagccaatctggggtcagtgatagataaaaatccatcgggatagtcttttaaagcgctttcacagtccaactgctgcggatgcgactccggagtctggatcacggtcatctggaagaagaacgatgggaatcataatccgaaaacggtatcggacgattgtgtctcatcaaacccacaagcagccgctgtctgcgtcgctccgtgcgactgctgtttatgggatcagggtccacagtgtcctgaagcatgattttaatagcccttaacatcaactttctggtgcgatgcgcgcagcaacgcattctgatttcactcaaatctttgcagtaggtacaacacattattacaatattgtttaataaaccataattaaaagcgctccagccaaaactcatatctgatataatcgcccctgcatgaccatcataccaaagtttaatataaattaaatgacgttccctcaaaaacacactacccacatacatgatctcttttggcatgtgcatattaacaatctgtctgtaccatggacaacgttggttaatcatgcaacccaatataaccttccggaaccacactgccaacaccgctcccccagccatgcattgaagtgaaccctgctgattacaatgacaatgaagaacccaattctctcgaccgtgaatcacttgagaatgaaaaatatctatagtggcacaacatagacataaatgcatgcatcttctcataatttttaactcctcaggatttagaaacatatcccagggaataggaagctcttgcagaacagtaaagctggcagaacaaggaagaccacgaacacaacttacactatgcatagtcatagtatcacaatctggcaacagcgggtggtcttcagtcatagaagctcgggtttcattttcctcacaacgtggtaactgggctctggtgtaagggtgatgtctggcgcatgatgtcgagcgtgcgcgcaaccttgtcataatggagttgcttcctgacattctcgtattttgtatagcaaaacgcggccctggcagaacacactcttcttcgccttctatcctgccgcttagcgtgttccgtgtgatagttcaagtacaaccacactcttaagttggtcaaaagaatgctggcttcagttgtaatcaaaactccatcgcatctaatcgttctgaggaaatcatccaagcaatgcaactggattgtgtttcaagcaggagaggagagggaagagacggaagaaccatgttaatttttattccaaacgatctcgcagtacttcaaattgtagatcgcgcagatggcatctctcgcccccactgtgttggtgaaaaagcacagctagatcaaaagaaatgcgattttcaaggtgctcaacggtggcttccagcaaagcctccacgcgcacatccaagaacaaaagaataccaaaagaaggagcattttctaactcctcaatcatcatattacattcctgcaccattcccagataattttcagctttccagccttgaattattcgtgtcagttcttgtggtaaatccaatccacacattacaaacaggtcccggagggcgccctccaccaccattcttaaacacaccctcataatgacaaaatatcttgctcctgtgtcacctgtagcgaattgagaatggcaacatcaattgacatgcccttggctctaagttcttctttaagttctagttgtaaaaactctctcatattatcaccaaactgcttagccagaagccccccgggaacaagagcaggggacgctacagtgcagtacaagcgcagacctccccaattggctccagcaaaaacaagattggaataagcatattgggaaccgccagtaatatcatcgaagttgctggaaatataatcaggcagagtttcttgtaaaaattgaataaaagaaaaatttgccaaaaaaacattcaaaacctctgggatgcaaatgcaataggttaccgcgctgcgctccaacattgttagttttgaattagtctgcaaaaataaaaaaaaaaacaagcgtcatatcatagtagcctgacgaacagatggataaatcagtctttccatcacaagacaagccacagggtctccagctcgaccctcgtaaaacctgtcatcatgattaaacaacagcaccgaaagttcctcgcggtgaccagcatgaataattcttgatgaagcatacaatccagacatgttagcatcagttaacgagaaaaaacagccaacatagcctttgggtataattatgcttaatcgtaagtatagcaaagccacccctcgcggatacaaagtaaaaggcacaggagaataaaaaatataattatttctctgctgctgttcaggcaacgtcgcccccggtccctctaaatacacatacaaagcctcatcagccatggcttaccagacaaagtacagcgggcacacaaagcacaagctctaaagtgactctccaacctctccacaatatatatatacacaagccctaaactgacgtaatgggagtaaagtgtaaaaaatcccgccaaacccaacacacaccccgaaactgcgtcaccagggaaaagtacagtttcacttccgcaatcccaacaggcgtaacttcctctttctcacggtacgtgatatcccactaacttgcaacgtcattttcccacggtcgcaccgccccttttagccgttaaccccacagccaatcaccacacgatccacactttttaaaatcacctcatttacatattggcaccattccatctataaggtatattatatagataga

SEQ ID NO: 80 - DNA, 35659 bp, Artificial Sequence
  Genome sequence of NG-708 virus
tctatctatataatataccttatagatggaatggtgccaatatgtaaatgaggtgattttaaaaagtgtggatcgtgtggtgattggctgtggggttaacggctaaaaggggcggtgcgaccgtgggaaaatgacgttttgtgggggtggagtttttttgcaagttgtcgcgggaaatgtgacgcataaaaaggcttttttctcacggaactacttagttttcccacggtatttaacaggaaatgaggtagttttgaccggatgcaagtgaaaattgttgattttcgcgcgaaaactgaatgaggaagtgtttttctgaataatgtggtatttatggcagggtggagtatttgttcagggccaggtagactttgacccattacgtggaggtttcgattaccgtgttttttacctgaatttccgcgtaccgtgtcaaagtcttctgtttttacgtaggtgtcagctgatcgctagggtatttatacctcagggtttgtgtcaagaggccactcttgagtgccagcgagaagagttttctcctctgcgccggcagtttaataataaaaaaatgagagatttgcgatttctgcctcaggaaataatctctgctgagactggaaatgaaatattggagcttgtggtgcacgccctgatgggagacgatccggagccacctgtgcagctttttgagcctcctacgcttcaggaactgtatgatttagaggtagagggatcggaggattctaatgaggaagctgtaaatggcttttttaccgattctatgcttttagctgctaatgaagggttagaattagatccgcctttggacacttttgatactccaggggtaattgtggaaagcggtacaggtgtaagaaaattacctgatttgagttccgtggactgtgatttgcactgctatgaagacgggtttcctccgagtgatgaggaggaccatgaaaaggagcagtccatgcagactgcagcgggtgagggagtgaaggctgccaatgttggttttcagttggattgcccggagcttcctggacatggctgtaagtcttgtgaatttcacaggaaaaatactggagtaaaggaactgttatgttcgctttgttatatgagaacgcactgccactttatttacagtaagtgtgtttaagttaaaatttaaaggaatatgctgtttttcacatgtatattgagtgtgagttttgtgcttcttattataggtcctgtgtctgatgctgatgaatcaccatctcctgattctactacctcacctcctgagattcaagcacctgttcctgtggacgtgcgcaagcccattcctgtgaagcttaagcctgggaaacgtccagcagtggaaaaacttgaggacttgttacagggtggggacggacctttggacttgagtacacggaaacgtccaagacaataagtgttccatatccgtgtttacttaaggtgacgtcaatatttgtgtgacagtgcaatgtaataaaaatatgttaactgttcactggtttttattgctttttgggcggggactcaggtatataagtagaagcagacctgtgtggttagctcataggagctggctttcatccatggaggtttgggccattttggaagaccttaggaagactaggcaactgttagagaacgcttcggacggagtctccggtttttggagattctggttcgctagtgaattagctagggtagtttttaggataaaacaggactataaacaagaatttgaaaagttgttggtagattgcccaggactttttgaagctcttaatttgggccatcaggttcactttaaagaaaaagttttatcagttttagacttttcaaccccaggtagaactgctgctgctgtggcttttcttacttttatattagataaatggatcccgcagactcatttcagcaggggatacgttttggatttcatagccacagcattgtggagaacatggaaggttcgcaagatgaggacaatcttaggttactggccagtgcagcctttgggtgtagcgggaatcctgaggcatccaccggtcatgccagcggttctggaggaggaacagcaagaggacaacccgagagccggcctggaccctccagtggaggaggcggagtagctgacttgtctcctgaactgcaacgggtgcttactggatctacgtccactggacgggataggggcgttaagagggagagggcatctagtggtactgatgctagatctgagttggctttaagtttaatgagtcgcagacgtcctgaaaccatttggtggcatgaggttcagaaagagggaagggatgaagtttctgtattgcaggagaaatattcactggaacaggtgaaaacatgttggttggagcctgaggatgattgggaggtggccattaaaaattatgccaagatagctttgaggcctgataaacagtataagattactagacggattaatatccggaatgcttgttacatatctggaaatggggctgaggtggtaatagatactcaagacaaggcagttattagatgctgcatgatggatatgtggcctggggtagtcggtatggaagcagtaacttttgtaaatgttaagtttaggggagatggttataatggaatagtgtttatggccaataccaaacttatattgcatggttgtagcttttttggtttcaacaatacctgtgtagatgcctggggacaggttagtgtacggggatgtagtttctatgcgtgttggattgccacagctggcagaaccaagagtcaattgtctctgaagaaatgcatatttcaaagatgtaacctgggcattctgaatgaaggcgaagcaagggtccgccactgcgcttctacagatactggatgttttattttgattaagggaaatgccagcgtaaagcataacatgatttgcggtgcttccgatgagaggccttatcaaatgctcacttgtgctggtgggcattgtaatatgctggctactgtgcatattgtttcccatcaacgcaaaaaatggcctgtttttgatcacaatgtgatgacgaagtgtaccatgcatgcaggtgggcgtagaggaatgtttatgccttaccagtgtaacatgaatcatgtgaaagtgttgttggaaccagatgccttttccagaatgagcctaacaggaatttttgacatgaacatgcaaatctggaagatcctgaggtatgatgatacgagatcgagggtacgcgcatgcgaatgcggaggcaagcatgccaggttccagccggtgtgtgtagatgtgactgaagatctcagaccggatcatttggttattgcccgcactggagcagagttcggatccagtggagaagaaactgactaaggtgagtattgggaaaactttggggtgggattttcagatggacagattgagtaaaaatttgttttttctgtcttgcagctgtcatgagtggaaacgcttcttttaaggggggagtcttcagcccttatctgacagggcgtctcccatcctgggcaggagttcgtcagaatgttatgggatctactgtggatggaagacccgtccaacccgccaattcttcaacgctgacctatgctactttaagttcttcacctttggacgcagctgcagctgccgccgccgcttctgttgccgctaacactgtgcttggaatgggttactatggaagcatcatggctaattccacttcctctaataacccttctaccctgactcaggacaagttacttgtccttttggcccagctggaggctttgacccaacgtctgggtgaactttctcagcaggtggtcgagttgcgagtacaaactgagtctgctgtcggcacggcaaagtctaaataaaaaaatcccagaatcaatgaataaataaacaagcttgttgttgatttaaaatcaagtgtttttatttcatttttcgcgcacggtatgccctagaccaccgatctctatcattgagaactcggtggattttttccaggatcctatagaggtgggattgaatgtttagatacatgggcattaggccgtctttggggtggagatagctccattgaagggattcatgctccggggtagtgttgtaaatcacccagtcataacaaggtcgcagtgcatggtgttgcacaatatcttttagaagtaggctgattgccacagataagcccttggtgtaggtgtttacaaaccggttgagctgggatgggtgcattcggggtgaaattatgtgcattttggattggatttttaagttggcaatattgccgccaagatcccgtcttgggttcatgttatgaaggaccaccaagacggtgtatccggtacatttaggaaatttatcgtgcagcttggatggaaaagcgtggaaaaatttggagacacccttgtgtcctccaagattttccatgcactcatccatgataatagcaatggggccgtgggcagcggcgcgggcaaacacgttccgtgggtctgacacatcatagttatgttcctgagttaaatcatcataagccattttaatgaatttggggcggagagtaccagattggggtatgaatgttccttcgggccccggagcatagttcccctcacagatttgcatttcccaagctttcagttccgagggtggaatcatgtccacctggggggctatgaaaaacaccgtttctggggcgggggtgattaattgtgatgatagcaaatttctgagcaattgagatttgccacatccggtggggccataaatgattccgattacgggttgcaggtggtagtttagggaacggcaactgccgtcttctcgaagcaagggggccacctcgttcatcatttcccttacatgcatattttcccgcaccaaatccattaggaggcgctctcctcctagtgatagaagttcttgtagtgaggaaaagtttttcagcggtttcagaccgtcagccatgggcattttggagagagtttgctgcaaaagttctagtctgttccacagttcagtgatgtgttctatggcatctcgatccagcagacctcctcgtttcgcgggtttggacggctcctggaatagggtatgagacgatgggcgtccagcgctgccagggttcggtccttccagggtctcagtgttcgagtcagggttgtttccgtcacagtgaaggggtgtgcgcctgcttgggcgcttgccagggtgcgcttcagactcatcctgctggtcgaaaacttctgtcgcttggcgccctgtatgtcggccaagtagcagtttaccatgagttcgtagttgagcgcctcggctgcgtggcctttggcgcggagcttacctttggaagttttcttgcataccgggcagtataggcatttcagcgcatacaacttgggcgcaaggaaaacggattctggggagtatgcatctgcgccgcaggaggcgcaaacagtttcacattccaccagccaggttaaatccggttcattggggtcaaaaacaagttttccgccatattttttgatgcgtttcttacctttggtctccatgagttcgtgtcctcgttgagtgacaaacaggctgtccgtgtccccgtagactgattttacaggcctcttctccagtggagtgcctcggtcttcttcgtacaggaactctgaccactctgatacaaaggcgcgcgtccaggccagcacaaaggaggctatgtgggaggggtagcgatcgttgtcaaccagggggtccaccttttccaaagtatgcaaacacatgtcaccctcttcaacatccaggaatgtgattggcttgtaggtgtatttcacgtgacctggggtccccgctgggggggtataaaagggggcggttctttgctcttcctcactgtcttccggatcgctgtccaggaacgtcagctgttggggtaggtattccctctcgaaggcgggcatgacctctgcactcaggttgtcagtttctaagaacgaggaggatttgatattgacagtgccggttgagatgcctttcatgaggttttcgtccatctggtcagaaaacacaatttttttattgtcaagtttggtggcaaatgatccatacagggcgttggataaaagtttggcaatggatcgcatggtttggttcttttccttgtccgcgcgctctttggcggcgatgttgagttggacatactcgcgtgccaggcacttccattcggggaagatagttgttaattcatctggcacgattctcacttgccaccctcgattatgcaaggtaattaaatccacactggtggccacctcgcctcgaaggggttcattggtccaacagagcctacctcctttcctagaacagaaagggggaagtgggtctagcataagttcatcgggagggtctgcatccatggtaaagattcccggaagtaaatccttatcaaaatagctgatgggagtggggtcatctaaggccatttgccattctcgagctgccagtgcgcgctcatatgggttaaggggactgccccatggcatgggatgggtgagtgcagaggcatacatgccacagatgtcatagacgtagatgggatcctcaaagatgcctatgtaggttggatagcatcgcccccctctgatacttgctcgcacatagtcatatagttcatgtgatggcgctagcagccccggacccaagttggtgcgattgggtttttctgttctgtagacgatctggcgaaagatggcgtgagaattggaagagatggtgggtctttgaaaaatgttgaaatgggcatgaggtagacctacagagtctctgacaaagtgggcataagattcttgaagcttggttaccagttcggcggtgacaagtacgtctagggcgcagtagtcaagtgtttcttgaatgatgtcataacctggttggtttttcttttcccacagttcgcggttgagaaggtattcttcgcgatccttccagtactcttctagcggaaacccgtctttgtctgcacggtaagatcctagcatgtagaactgattaactgccttgtaagggcagcagcccttctctacgggtagagagtatgcttgagcagcttttcgtagcgaagcgtgagtaagggcaaaggtgtctctgaccatgactttgaggaattggtatttgaagtcgatgtcgtcacaggctccctgttcccagagttggaagtctacccgtttcttgtaggcggggttgggcaaagcgaaagtaacatcattgaagagaatcttgccggccctgggcatgaaattgcgagtgatgcgaaaaggctgtggtacttccgctcggttattgataacctgggcagctaggacgatctcgtcgaaaccgttgatgttgtgtcctacgatgtataattctatgaaacgcggcgtgcctctgacgtgaggtagcttactgagctcatcaaaggttaggtctgtggggtcagataaggcgtagtgttcgagagcccattcgtgcaggtgaggattcgctttaaggaaggaggaccagaggtccactgccagtgctgtttgtaactggtcccggtactgacgaaaatgccgtccgactgccattttttctggggtgacgcaatagaaggtttgggggtcctgccgccagcgatcccacttgagttttatggcgaggtcataggcgatgttgacgagccgctggtctccagagagtttcatgaccagcatgaaggggattagctgcttgccaaaggaccccatccaggtgtaggtttccacatcgtaggtgagaaagagcctttctgtgcgaggatgagagccaatcgggaagaactggatctcctgccaccagttggaggaatggctgttgatgtgatggaagtagaactccctgcgacgcgccgagcattcatgcttgtgcttgtacagacggccgcagtagtcgcagcgttgcacgggttgtatctcgtgaatgagttgtacctggcttcccttgacgagaaatttcagtgggaagccgaggcctggcgattgtatctcgtgctttactatgttgtctgcatcggcctgttcatcttctgtctcgatggtggtcatgctgacgagccctcgcgggaggcaagtccagacctcggcgcggcaggggcggagctcgaggacgagagcgcgcaggctggagctgtccagggtcctgagacgctgcggactcaggttagtaggcagtgtcaggagattaacttgcatgatcttttggagggcgtgcgggaggttcagatagtacttgatctcaacgggtccgttggtggagatgtcgatggcttgcagggttccgtgtcccttgggcgctaccaccgtgcccttgtttttcattttggacggcggtggctctgttgcttcttgcatgtttagaagcggtgtcgagggcgcgcaccgggcggcaggggcggctcgggacccggcggcatggctggcagtggtacgtcggcgccgcgcgcgggtaggttctggtactgcgccctgagaagactcgcatgcgcgacgacgcggcggttgacatcctggatctgacgcctctgggtgaaagctaccggccccgtgagcttgaacctgaaagagagttcaacagaatcaatctcggtatcgttgacggcggcttgcctaaggatttcttgcacgtcaccagagttgtcctggtaggcgatctccgccatgaactgctcgatctcttcctcttgaagatctccgcggcccgctctctcgacggtggccgcgaggtcgttggagatgcgcccaatgagttgagagaatgcattcatgcccgcctcgttccagacgcggctgtagaccacggcccccacgggatctctcgcgcgcatgaccacctgggcgaggttgagctccacgtggcgggtgaagaccgcatagttgcataggcgctggaaaaggtagttgagtgtggtggcgatgtgctcggtgacgaagaaatacatgatccatcgtctcagcggcatctcgctgacatcgcccagagcttccaagcgctccatggcctcgtagaagtccacggcaaaattaaaaaactgggagtttcgcgcggacacggtcaactcctcttccagaagacggataagttcggcgatggtggtgcgcacctcgcgctcgaaagcccctgggatttcttcctcaatctcttcttcttccactaacatctcttcctcttcaggtggggctgcaggaggagggggaacgcggcgacgccggcggcgcacgggcagacggtcgatgaatctttcaatgacctctccgcggcggcggcgcatggtttcagtgacggcgcggccgttctcgcgcggtcgcagagtaaaaacaccgccgcgcatctccttaaagtggtgactgggaggttctccgtttgggagggagagggcgctgattatacattttattaattggcccgtagggactgcacgcagagatctgatcgtgtcaagatccacgggatctgaaaacctttcgacgaaagcgtctaaccagtcacagtcacaaggtaggctgagtacggcttcttgtgggcgggggtggttatgtgttcggtctgggtcttctgtttcttcttcatctcgggaaggtgagacgatgctgctggtgatgaaattaaagtaggcagttctaagacggcggatggtggcgaggagcaccaggtctttgggtccggcttgctggatacgcaggcgattggccattccccaagcattatcctgacatctagcaagatctttgtagtagtcttgcatgagccgttctacgggcacttcttcctcacccgttctgccatgcatacgtgtgagtccaaatccgcgcattggttgtaccagtgccaagtcagctacgactctttcggcgaggatggcttgctgtacttgggtaagggtggcttgaaagtcatcaaaatccacaaagcggtggtaagctcctgtattaatggtgtaagcacagttggccatgactgaccagttaactgtctggtgaccagggcgcacgagctcggtgtatttaaggcgcgaataggcgcgggtgtcaaagatgtaatcgttgcaggtgcgcaccagatactggtaccctataagaaaatgcggcggtggttggcggtagagaggccatcgttctgtagctggagcgccaggggcgaggtcttccaacataaggcggtgatagccgtagatgtacctggacatccaggtgattcctgcggcggtagtagaagcccgaggaaactcgcgtacgcggttccaaatgttgcgtagcggcatgaagtagttcattgtaggcacggtttgaccagtgaggcgcgcgcagtcattgatgctctatagacacggagaaaatgaaagcgttcagcgactcgactccgtagcctggaggaacgtgaacgggttgggtcgcggtgtaccccggttcgagacttgtactcgagccggccggagccgcggctaacgtggtattggcactcccgtctcgacccagcctacaaaaatccaggatacggaatcgagtcgttttgctggtttccgaatggcagggaagtgagtcctattttttttttttgccgctcagatgcatcccgtgctgcgacagatgcgcccccaacaacagcccccctcgcagcagcagcagcagcaatcacaaaaggctgtccctgcaactactgcaactgccgccgtgagcggtgcgggacagcccgcctatgatctggacttggaagagggcgaaggactggcacgtctaggtgcgccttcacccgagcggcatccgcgagttcaactgaaaaaagattctcgcgaggcgtatgtgccccaacagaacctatttagagacagaagcggcgaggagccggaggagatgcgagcttcccgctttaacgcgggtcgtgagctgcgtcacggtttggaccgaagacgagtgttgcgggacgaggatttcgaagttgatgaaatgacagggatcagtcctgccagggcacacgtggctgcagccaaccttgtatcggcttacgagcagacagtaaaggaagagcgtaacttccaaaagtcttttaataatcatgtgcgaaccctgattgcccgcgaagaagttacccttggtttgatgcatttgtgggatttgatggaagctatcattcagaaccctactagcaaacctctgaccgcccagctgtttctggtggtgcaacacagcagagacaatgaggctttcagagaggcgctgctgaacatcaccgaacccgaggggagatggttgtatgatcttatcaacattctacagagtatcatagtgcaggagcggagcctgggcctggccgagaaggtggctgccatcaattactcggttttgagcttgggaaaatattacgctcgcaaaatctacaagactccatacgttcccatagacaaggaggtgaagatagatgggttctacatgcgcatgacgctcaaggtcttgaccctgagcgatgatcttggggtgtatcgcaatgacagaatgcatcgcgcggttagcgccagcaggaggcgcgagttaagcgacagggaactgatgcacagtttgcaaagagctctgactggagctggaaccgagggtgagaattacttcgacatgggagctgacttgcagtggcagcctagtcgcagggctctgagcgccgcgacggcaggatgtgagcttccttacatagaagaggcggatgaaggcgaggaggaagagggcgagtacttggaagactgatggcacaacccgtgttttttgctagatggaacagcaagcaccggatcccgcaatgcgggcggcgctgcagagccagccgtccggcattaactcctcggacgattggacccaggccatgcaacgtatcatggcgttgacgactcgcaaccccgaagcctttagacagcaaccccaggccaaccgtctatcggccatcatggaagctgtagtgccttcccgctctaatcccactcatgagaaggtcctggccatcgtgaacgcgttggtggagaacaaagctattcgtccagatgaggccggactggtatacaacgctctcttagaacgcgtggctcgctacaacagtagcaatgtgcaaaccaatttggaccgtatgataacagatgtacgcgaagccgtgtctcagcgcgaaaggttccagcgtgatgccaacctgggttcgctggtggcgttaaatgctttcttgagtactcagcctgctaatgtgccgcgtggtcaacaggattatactaactttttaagtgctttgagactgatggtatcagaagtacctcagagcgaagtgtatcagtccggtcctgattacttctttcagactagcagacagggcttgcagacggtaaatctgagccaagcttttaaaaaccttaaaggtttgtggggagtgcatgccccggtaggagaaagagcaaccgtgtctagcttgttaactccgaactcccgcctattattactgttggtagctcctttcaccgacagcggtagcatcgaccgtaattcctatttgggttacctactaaacctgtatcgcgaagccatagggcaaagtcaggtggacgagcagacctatcaagaaattacccaagtcagtcgcgctttgggacaggaagacactggcagtttggaagccactctgaacttcttgcttaccaatcggtctcaaaagatccctcctcaatatgctcttactgcggaggaggagaggatccttagatatgtgcagcagagcgtgggattgtttctgatgcaagagggggcaactccgactgcagcactggacatgacagcgcgaaatatggagcccagcatgtatgccagtaaccgacctttcattaacaaactgctggactacttgcacagagctgccgctatgaactctgattatttcaccaatgccatcttaaacccgcactggctgcccccacctggtttctacacgggcgaatatgacatgcccgaccctaatgacggatttctgtgggacgacgtggacagcgatgttttttcacctctttctgatcatcgcacgtggaaaaaggaaggcggcgatagaatgcattcttctgcatcgctgtccggggtcatgggtgctaccgcggctgagcccgagtctgcaagtccttttcctagtctacccttttctctacacagtgtacgtagcagcgaagtgggtagaataagtcgcccgagtttaatgggcgaagaggagtatctaaacgattccttgctcagaccggcaagagaaaaaaatttcccaaacaatggaatagaaagtttggtggataaaatgagtagatggaagacttatgctcaggatcacagagacgagcctgggatcatggggattacaagtagagcgagccgtagacgccagcgccatgacagacagaggggtcttgtgtgggacgatgaggattcggccgatgatagcagcgtgctggacttgggtgggagaggaaggggcaacccgtttgctcatttgcgccctcgcttgggtggtatgttgtaaaaaaaaataaaaaaaaaactcaccaaggccatggcgacgagcgtacgttcgttcttctttattatctgtgtctagtataatgaggcgagtcgtgctaggcggagcggtggtgtatccggagggtcctcctccttcgtacgagagcgtgatgcagcagcagcaggcgacggcggtgatgcaatccccactggaggctccctttgtgcctccgcgatacctggcacctacggagggcagaaacagcattcgttattcggaactggcacctcagtacgataccaccaggttgtatctggtggacaacaagtcggcggacattgcttctctgaactatcagaatgaccacagcaacttcttgaccacggtggtgcaaaacaatgactttacccctacggaagccagcacccagaccattaactttgatgaacgatcgcggtggggcggtcagctaaagaccatcatgcatactaacatgccaaacgtgaacgagtatatgtttagtaacaagttcaaagcgcgtgtgatggtgtccagaaaacctcccgacggtgctgcagttggggatacttatgatcacaagcaggatattttgaaatatgagtggttcgagtttactttgccagaaggcaacttttcagttactatgactattgatttgatgaacaatgccatcatagataattacttgaaagtgggtagacagaatggagtgcttgaaagtgacattggtgttaagttcgacaccaggaacttcaagctgggatgggatcccgaaaccaagttgatcatgcctggagtgtatacgtatgaagccttccatcctgacattgtcttactgcctggctgcggagtggattttaccgagagtcgtttgagcaaccttcttggtatcagaaaaaaacagccatttcaagagggttttaagattttgtatgaagatttagaaggtggtaatattccggccctcttggatgtagatgcctatgagaacagtaagaaagaacaaaaagccaaaatagaagctgctacagctgctgcagaagctaaggcaaacatagttgccagcgactctacaagggttgctaacgctggagaggtcagaggagacaattttgcgccaacacctgttccgactgcagaatcattattggccgatgtgtctgaaggaacggacgtgaaactcactattcaacctgtagaaaaagatagtaagaatagaagctataatgtgttggaagacaaaatcaacacagcctatcgcagttggtatctttcgtacaattatggcgatcccgaaaaaggagtgcgttcctggacattgctcaccacctcagatgtcacctgcggagcagagcaggtctactggtcgcttccagacatgatgaaggatcctgtcactttccgctccactagacaagtcagtaactaccctgtggtgggtgcagagcttatgcccgtcttctcaaagagcttctacaacgaacaagctgtgtactcccagcagctccgccagtccacctcgcttacgcacgtcttcaaccgctttcctgagaaccagattttaatccgtccgccggcgcccaccattaccaccgtcagtgaaaacgttcctgctctcacagatcacgggaccctgccgttgcgcagcagtatccggggagtccaacgtgtgaccgttactgacgccagacgccgcacctgtccctacgtgtacaaggcactgggcatagtcgcaccgcgcgtcctttcaagccgcactttctaaaaaaaaaaaaaatgtccattcttatctcgcccagtaataacaccggttggggtctgcgcgctccaagcaagatgtacggaggcgcacgcaaacgttctacccaacatcctgtccgtgttcgcggacattttcgcgctccatggggcgccctcaagggccgcactcgcgttcgaaccaccgtcgatgatgtaatcgatcaggtggttgccgacgcccgtaattatactcctactgcgcctacatctactgtggatgcagttattgacagtgtagtggctgacgctcgcaactatgctcgacgtaagagccggcgaaggcgcattgccagacgccaccgagctaccactgccatgcgagccgcaagagctctgctacgaagagctagacgcgtggggcgaagagccatgcttagggcggccagacgtgcagcttcgggcgccagcgccggcaggtcccgcaggcaagcagccgctgtcgcagcggcgactattgccgacatggcccaatcgcgaagaggcaatgtatactgggtgcgtgacgctgccaccggtcaacgtgtacccgtgcgcacccgtccccctcgcacttagaagatactgagcagtctccgatgttgtgtcccagcggcgaggatgtccaagcgcaaatacaaggaagaaatgctgcaggttatcgcacctgaagtctacggccaaccgttgaaggatgaaaaaaaaccccgcaaaatcaagcgggttaaaaaggacaaaaaagaagaggaagatggcgatgatgggctggcggagtttgtgcgcgagtttgccccacggcgacgcgtgcaatggcgtgggcgcaaagttcgacatgtgttgagacctggaacttcggtggtctttacacccggcgagcgttcaagcgctacttttaagcgttcctatgatgaggtgtacggggatgatgatattcttgagcaggcggctgaccgattaggcgagtttgcttatggcaagcgtagtagaataacttccaaggatgagacagtgtcgatacccttggatcatggaaatcccacccctagtcttaaaccggtcactttgcagcaagtgttacccgtaactccgcgaacaggtgttaaacgcgaaggtgaagatttgtatcccactatgcaactgatggtacccaaacgccagaagttggaggacgttttggagaaagtaaaagtggatccagatattcaacctgaggttaaagtgagacccattaagcaggtagcgcctggtctgggggtacaaactgtagacattaagattcccactgaaagtatggaagtgcaaactgaacccgcaaagcctactgccacctccactgaagtgcaaacggatccatggatgcccatgcctattacaactgacgccgccggtcccactcgaagatcccgacgaaagtacggtccagcaagtctgttgatgcccaattatgttgtacacccatctattattcctactcctggttaccgaggcactcgctactatcgcagccgaaacagtacctcccgccgtcgccgcaagacacctgcaaatcgcagtcgtcgccgtagacgcacaagcaaaccgactcccggcgccctggtgcggcaagtgtaccgcaatggtagtgcggaacctttgacactgccgcgtgcgcgttaccatccgagtatcatcacttaatcaatgttgccgctgcctccttgcagatatggccctcacttgtcgccttcgcgttcccatcactggttaccgaggaagaaactcgcgccgtagaagagggatgttgggacgcggaatgcgacgctacaggcgacggcgtgctatccgcaagcaattgcggggtggttttttaccagccttaattccaattatcgctgctgcaattggcgcgataccaggcatagcttccgtggcggttcaggcctcgcaacgacattgacattggaaaaaaacgtataaataaaaaaaaaaaaatacaatggactctgacactcctggtcctgtgactatgttttcttagagatggaagacatcaatttttcatccttggctccgcgacacggcacgaagccgtacatgggcacctggagcgacatcggcacgagccaactgaacgggggcgccttcaattggagcagtatctggagcgggcttaaaaattttggctcaaccataaaaacatacgggaacaaagcttggaacagcagtacaggacaggcgcttagaaataaacttaaagaccagaacttccaacaaaaagtagtcgatgggatagcttccggcatcaatggagtggtagatttggctaaccaggctgtgcagaaaaagataaacagtcgtttggacccgccgccagcaaccccaggtgaaatgcaagtggaggaagaaattcctccgccagaaaaacgaggcgacaagcgtccgcgtcccgatttggaagagacgctggtgacgcgcgtagatgaaccgccttcttatgaggaagcaacgaagcttggaatgcccaccactagaccgatagccccaatggccaccggggtgatgaaaccttctcagttgcatcgacccgtcaccttggatttgccccctccccctgctgctactgctgtacccgcttctaagcctgtcgctgccccgaaaccagtcgccgtagccaggtcacgtcccgggggcgctcctcgtccaaatgcgcactggcaaaatactctgaacagcatcgtgggtctaggcgtgcaaagtgtaaaacgccgtcgctgcttttaattaaatatggagtagcgcttaacttgcctatctgtgtatatgtgtcattacacgccgtcacagcagcagaggaaaaaaggaagaggtcgtgcgtcgacgctgagttactttcaagatggccaccccatcgatgctgccccaatgggcatacatgcacatcgccggacaggatgcttcggagtacctgagtccgggtctggtgcagttcgcccgcgccacagacacctacttcaatctgggaaataagtttagaaatcccaccgtagcgccgacccacgatgtgaccaccgaccgtagccagcggctcatgttgcgcttcgtgcccgttgaccgggaggacaatacatactcttacaaagtgcggtacaccctggccgtgggcgacaacagagtgctggatatggccagcacgttctttgacattaggggtgtgttggacagaggtcccagtttcaaaccctattctggtacggcttacaactccctggctcctaaaggcgctccaaatacatctcagtggattgcagaaggtgtaaaaaatacaactggtgaggaacacgtaacagaagaggaaaccaatactactacttacacttttggcaatgctcctgtaaaagctgaagctgaaattacaaaagaaggactcccagtaggtttggaagtttcagatgaagaaagtaaaccgatttatgctgataaaacatatcagccagaacctcagctgggagatgaaacttggactgaccttgatggaaaaaccgaaaagtatggaggcagggctctcaaacccgatactaagatgaaaccatgctacgggtcctttgccaaacctactaatgtgaaaggcggtcaggcaaaacaaaaaacaacggagcagccaaatcagaaagtcgaatatgatatcgacatggagttttttgatgcggcatcgcagaaaacaaacttaagtcctaaaattgtcatgtatgcagaaaatgtaaatttggaaactccagacactcatgtagtgtacaaacctggaacagaagacacaagttccgaagctaatttgggacaacaatctatgcccaacagacccaactacattggcttcagagataactttattggacttatgtactataacagtactggtaacatgggggtgctggctggtcaagcgtctcagttaaatgcagtggttgacttgcaggacagaaacacagaactttcttaccaactcttgcttgactctctgggcgacagaaccagatactttagcatgtggaatcaggctgtggacagttatgatcctgatgtacgtgttattgaaaatcatggtgtggaagatgaacttcccaactactgttttccactggacggcataggtgttccaacaaccagttacaaatcaatagttccaaatggagacaatgcgcctaattggaaggaacctgaagtaaatggaacaagtgagatcggacagggtaatttgtttgccatggaaattaaccttcaagccaatctatggcgaagtttcctttattccaatgtggctctatatctcccagactcgtacaaatacaccccgtccaatgtcactcttccagaaaacaaaaacacctacgactacatgaacgggcgggtggtgccgccatctctagtagacacctatgtgaacattggtgccaggtggtctctggatgccatggacaatgtcaacccattcaaccaccaccgtaacgctggcttgcgttaccgatccatgcttctgggtaacggacgttatgtgcctttccacatacaagtgcctcaaaaattcttcgctgttaaaaacctgctgcttctcccaggctcctacacttatgagtggaactttaggaaggatgtgaacatggttctacagagttccctcggtaacgacctgcgggtagatggcgccagcatcagtttcacgagcatcaacctctatgctacttttttccccatggctcacaacaccgcttccacccttgaagccatgctgcggaatgacaccaatgatcagtcattcaacgactacctatctgcagctaacatgctctaccccattcctgccaatgcaaccaatattcccatttccattccttctcgcaactgggcggctttcagaggctggtcatttaccagactgaaaaccaaagaaactccctctttggggtctggatttgacccctactttgtctattctggttctattccctacctggatggtaccttctacctgaaccacacttttaagaaggtttccatcatgtttgactcttcagtgagctggcctggaaatgacaggttactatctcctaacgaatttgaaataaagcgcactgtggatggcgaaggctacaacgtagcccaatgcaacatgaccaaagactggttcttggtacagatgctcgccaactacaacatcggctatcagggcttctacattccagaaggatacaaagatcgcatgtattcatttttcagaaacttccagcccatgagcaggcaggtggttgatgaggtcaattacaaagacttcaaggccgtcgccataccctaccaacacaacaactctggctttgtgggttacatggctccgaccatgcgccaaggtcaaccctatcccgctaactatccctatccactcattggaacaactgccgtaaatagtgttacgcagaaaaagttcttgtgtgacagaaccatgtggcgcataccgttctcgagcaacttcatgtctatgggggcccttacagacttgggacagaatatgctctatgccaactcagctcatgctctggacatgacctttgaggtggatcccatggatgagcccaccctgctttatcttctcttcgaagttttcgacgtggtcagagtgcatcagccacaccgcggcatcatcgaggcagtctacctgcgtacaccgttctcggccggtaacgctaccacgtaagaagcttcttgcttcttgcaaatagcagctgcaaccatggcctgcggatcccaaaacggctccagcgagcaagagctcagagccattgtccaagacctgggttgcggaccctattttttgggaacctacgataagcgcttcccggggttcatggcccccgataagctcgcctgtgccattgtaaatacggccggacgtgagacggggggagagcactggttggctttcggttggaacccacgttctaacacctgctacctttttgatccttttggattctcggatgatcgtctcaaacagatttaccagtttgaatatgagggtctcctgcgccgcagcgctcttgctaccaaggaccgctgtattacgctggaaaaatctacccagaccgtgcagggtccccgttctgccgcctgcggacttttctgctgcatgttccttcacgcctttgtgcactggcctgaccgtcccatggacggaaaccccaccatgaaattgctaactggagtgccaaacaacatgcttcattctcctaaagtccagcccaccctgtgtgacaatcaaaaagcactctaccattttcttaatacccattcgccttattttcgctcccatcgtacacacatcgaaagggccactgcgttcgaccgtatggatgttcaataatgactcatgtaaacaacgtgttcaataaacatcactttatttttttacatgtatcaaggctctgcattacttatttatttacaagtcgaatgggttctgacgagaatcagaatgacccgcaggcagtgatacgttgcggaactgatacttgggttgccacttgaattcgggaatcaccaacttgggaaccggtatatcgggcaggatgtcactccacagctttctggtcagctgcaaagctccaagcaggtcaggagccgaaatcttgaaatcacaattaggaccagtgctttgagcgcgagagttgcggtacaccggattgcagcactgaaacaccatcagcgacggatgtctcacgcttgccagcacggtgggatctgcaatcatgcccacatccagatcttcagcattggcaatgctgaacggggtcatcttgcaggtctgcctacccatggcgggcacccaattaggcttgtggttgcaatcgcagtgcagggggatcagtatcatcttggcctgatcctgtctgattcctggatacacggctctcatgaaagcatcatattgcttgaaagcctgctgggctttactaccctcggtataaaacatcccgcaggacctgctcgaaaactggttagctgcacagccggcatcattcacacagcagcgggcgtcattgttagctatttgcaccacacttctgccccagcggttttgggtgattttggttcgctcgggattctcctttaaggctcgttgtccgttctcgctggccacatccatctcgataatctgctccttctgaatcataatattgccatgcaggcacttcagcttgccctcataatcattgcagccatgaggccacaacgcacagcctgtacattcccaattatggtgggcgatctgagaaaaagaatgtatcattccctgcagaaatcttcccatcatcgtgctcagtgtcttgtgactagtgaaagttaactggatgcctcggtgctcctcgtttacgtactggtgacagatgcgcttgtattgttcgtgttgctcaggcattagtttaaaagaggttctaagttcgttatccagcctgtacttctccatcagcagacacatcacttccatgcctttctcccaagcagacaccaggggcaagctaatcggattcttaacagtgcaggcagcagctcctttagccagagggtcatctttagcgatcttctcaatgcttcttttgccatccttctcaacgatgcgcacgggcgggtagctgaaacccactgctacaagttgcgcctcttctctttcttcttcgctgtcttgactgatgtcttgcatggggatatgtttggtcttccttggcttctttttggggggtatcggaggaggaggactgtcgctccgttccggagacagggaggattgtgacgtttcgctcaccattaccaactgactgtcggtagaagaacctgaccccacacggcgacaggtgtttctcttcgggggcagaggtggaggcgattgcgaagggctgcggtccgacctggaaggcggatgactggcagaaccccttccgcgttcgggggtgtgctccctgtggcggtcgcttaactgatttccttcgcggctggccattgtgttctcctaggcagagaaacaacagacatggaaactcagccattgctgtcaacatcgccacgagtgccatcacatctcgtcctcagcgacgaggaaaaggagcagagcttaagcattccaccgcccagtcctgccaccacctctaccctagaagataaggaggtcgacgcatctcatgacatgcagaataaaaaagcgaaagagtctgagacagacatcgagcaagacccgggctatgtgacaccggtggaacacgaggaagagttgaaacgctttctagagagagaggatgaaaactgcccaaaacaacgagcagataactatcaccaagatgctggaaatagggatcagaacaccgactacctcatagggcttgacggggaagacgcgctccttaaacatctagcaagacagtcgctcatagtcaaggatgcattattggacagaactgaagtgcccatcagtgtggaagagctcagccgcgcctacgagcttaacctcttttcacctcgtactccccccaaacgtcagccaaacggcacctgcgagccaaatcctcgcttaaacttttatccagcttttgctgtgccagaagtactggctacctatcacatcttttttaaaaatcaaaaaattccagtctcctgccgcgctaatcgcacccgcgccgatgccctactcaatctgggacctggttcacgcttacctgatatagcttccttggaagaggttccaaagatcttcgagggtctgggcaataatgagactcgggccgcaaatgctctgcaaaagggagaaaatggcatggatgagcatcacagcgttctggtggaattggaaggcgataatgccagactcgcagtactcaagcgaagcatcgaggtcacacacttcgcatatcccgctgtcaacctgccccctaaagtcatgacggcggtcatggaccagttactcattaagcgcgcaagtcccctttcagaagacatgcatgacccagatgcctgtgatgagggtaaaccagtggtcagtgatgagcagctaacccgatggctgggcaccgactctcccagggatttggaagagcgtcgcaagcttatgatggccgtggtgctggttaccgtagaactagagtgtctccgacgtttctttaccgattcagaaaccttgcgcaaactcgaagagaatctgcactacacttttagacacggctttgtgcggcaggcatgcaagatatctaacgtggaactcaccaacctggtttcctacatgggtattctgcatgagaatcgcctaggacaaagcgtgctgcacagcaccctgaagggggaagcccgccgtgattacatccgcgattgtgtctatctgtacctgtgccacacgtggcaaaccggcatgggtgtatggcagcaatgtttagaagaacagaacttgaaagagcttgacaagctcttacagaaatctcttaaggttctgtggacagggttcgacgagcgcaccgtcgcttccgacctggcagacctcatcttcccagagcgtctcagggttactttgcgaaacggattgcctgactttatgagccagagcatgcttaacaattttcgctctttcatcctggaacgctccggtatcctgcccgccacctgctgcgcactgccctccgactttgtgcctctcacctaccgcgagtgccccccgccgctatggagtcactgctacctgttccgtctggccaactatctctcctaccactcggatgtgatcgaggatgtgagcggagacggcttgctggagtgtcactgccgctgcaatctgtgcacgccccaccggtccctagcttgcaacccccagttgatgagcgaaacccagataataggcacctttgaattgcaaggccccagcagccaaggcgatgggtcttctcctgggcaaagtttaaaactgaccccgggactgtggacctccgcctacttgcgcaagtttgctccggaagattaccacccctatgaaatcaagttctatgaggaccaatcacagcctccaaaggccgaactttcggcctgcgtcatcacccagggggcaattctggcccaattgcaagccatccaaaaatcccgccaagaatttctactgaaaaagggtaagggggtctaccttgacccccagaccggcgaggaactcaacacaaggttccctcaggatgtcccaacgacgagaaaacaagaagttgaaggtgcagccgccgcccccagaagatatggaggaagattgggacagtcaggcagaggaggcggaggaggacagtctggaggacagtctggaggaagacagtttggaggaggaaaacgaggaggcagaggaggtggaagaagtaaccgccgacaaacagttatcctcggctgcggagacaagcaacagcgctaccatctccgctccgagtcgaggaacccggcggcgtcccagcagtagatgggacgagaccggacgcttcccgaacccaaccagcgcttccaagaccggtaagaaggatcggcagggatacaagtcctggcgggggcataagaatgccatcatctcctgcttgcatgagtgcgggggcaacatatccttcacgcggcgctacttgctattccaccatggggtgaactttccgcgcaatgttttgcattactaccgtcacctccacagcccctactatagccagcaaatcccggcagtctcgacagataaagacagcggcggcgacctccaacagaaaaccagcagcggcagttagaaaatacacaacaagtgcagcaacaggaggattaaagattacagccaacgagccagcgcaaacccgagagttaagaaatcggatctttccaaccctgtatgccatcttccagcagagtcggggtcaagagcaggaactgaaaataaaaaaccgatctctgcgttcgctcaccagaagttgtttgtatcacaagagcgaagatcaacttcagcgcactctcgaggacgccgaggctctcttcaacaagtactgcgcgctgactcttaaagagtaggcagcgaccgcgcttattcaaaaaaggcgggaattacatcatcctcgacatgagtaaagaaattcccacgccttacatgtggagttatcaaccccaaatgggattggcggcaggcgcctcccaggactactccacccgcatgaattggctcagcgccgggccttctatgatttctcgagttaatgatatacgcgcctaccgaaaccaaatacttttggaacagtcagctcttaccaccacgccccgccaacaccttaatcccagaaattggcccgccgccctagtgtaccaggaaagtcccgctcccaccactgtattacttcctcgagacgcccaggccgaagtccaaatgactaatgcaggtgcgcagttagctggcggctccaccctatgtcgtcacaggcctcggcataatataaaacgcctgatgatcagaggccgaggtatccagctcaacgacgagtcggtgagctctccgcttggtctacgaccagacggaatctttcagattgccggctgcgggagatcttccttcacccctcgtcaggctgttctgactttggaaagttcgtcttcgcaaccccgctcgggcggaatcgggaccgttcaatttgtggaggagtttactccctctgtctacttcaaccccttctccggatctcctgggcattacccggacgagttcataccgaacttcgacgcgattagcgagtcagtggacggctacgattgatgtctggtgacgcggctgagctatctcggctgcgacatctagaccactgccgccgctttcgctgctttgcccgggaactcattgagttcatctacttcgaactccccaaggatcaccctcaaggtccggcccacggagtgcggatttctatcgaaggcaaaatagactctcgcctgcaacgaattttctcccagcggcccgtgctgatcgagcgagaccagggaaacaccacggtttccatctactgcatttgtaatcaccccggattgcatgaaagcctttgctgtcttatgtgtactgagtttaataaaaactgaattaagactctcctacggactgccgcttcttcaacccggattttacaaccagaagaacgaaacttttcctgtcgtccaggactctgttaacttcacctttcctactcacaaactagaagctcaacgactacaccgcttttccagaagcattttccctactaatactactttcaaaaccggaggtgagctccaaggtcttcctacagaaaacccttgggtggaagcgggccttgtagtgctaggaattcttgcgggtgggcttgtgattattctttgctacctatacacaccttgcttcactttcttagtggtgttgtggtattggtttaaaaaatggggcccatactagtcttgcttgttttactttcgcttttggaaccgggttctgccaattacgatccatgtctagacttcgacccagaaaactgcacacttacttttgcacccgacacaagccgcatctgtggagttcatcgcctctcttacgaacttggcccccaacgacaaaaatttacctgcatggtgggaatcaaccccatagttatcacccagcaaagtggagatactaagggttgcattcactgctcctgcgattccatcgagtgcacctacaccctgctgaagaccctatgcggcctaagagacctgctaccaatgaattaaaaaatgattaataaaaaatcacttacttgaaatcagcaataaggtctctgttgaaattttctcccagcagcacctcacttccctcttcccaactctggtattctaaaccccgttcagcggcatactttctccatactttaaaggggatgtcaaattttagctcctctcctgtacccacaatcttcatgtctttcttcccagatgaccaagagagtccggctcagtgactccttcaaccctgtctacccctatgaagatgaaagcacctcccaacacccctttataaacccagggtttatttccccaaatggcttcacacaaagcccaaacggagttcttactttaaaatgtttaaccccactaacaaccacaggcggatctctacagctaaaagtgggagggggacttacagtggatgacaccaacggttttttgaaagaaaacataagtgccaccacaccactcgttaagactggtcactctataggtttaccactaggagccggattgggaacgaatgaaaataaactttgtatcaaattaggacaaggacttacattcaattcaaacaacatttgcattgatgacaatattaacaccttatggacaggagtcaaccccaccgaagccaactgtcaaatcatgaactccagtgaatctaatgattgcaaattaattctaacactagttaaaactggagcactagtcactgcatttgtttatgttataggagtatctaacaattttaatatgctaactacacacagaaatataaattttactgcagagctgtttttcgattctactggtaatttactaactagactctcatccctcaaaactccacttaatcataaatcaggacaaaacatggctactggtgccattactaatgctaaaggtttcatgcccagcacgactgcctatcctttcaatgataattctagagaaaaagaaaactacatttacggaacttgttactacacagctagtgatcgcactgcttttcccattgacatatctgtcatgcttaaccgaagagcaataaatgacgagacatcatattgtattcgtataacttggtcctggaacacaggagatgccccagaggtgcaaacctctgctacaaccctagtcacctccccatttaccttttactacatcagagaagacgactgacaaataaagtttgcgatcgccaggcccaccatgtgtcaccagcagttggtcatctcttggttttccctggtttttctggcatctcccctcgtggccatatgggaactgaagaaagatgtttatgtcgtagaattggattggtatccggatgcccctggagaaatggtggtcctcacctgtgacacccctgaagaagatggtatcacctggaccttggaccagagcagtgaggtcttaggctctggcaaaaccctgaccatccaagtcaaagagtttggagatgctggccagtacacctgtcacaaaggaggcgaggttctaagccattcgctcctgctgcttcacaaaaaggaagatggaatttggtccactgatattttaaaggaccagaaagaacccaaaaataagacctttctaagatgcgaggccaagaattattctggacgtttcacctgctggtggctgacgacaatcagtactgatttgacattcagtgtcaaaagcagcagaggctcttctgacccccaaggggtgacgtgcggagctgctacactctctgcagagagagtcagaggggacaacaaggagtatgagtactcagtggagtgccaggaggacagtgcctgcccagctgctgaggagagtctgcccattgaggtcatggtggatgccgttcacaagctcaagtatgaaaactacaccagcagcttcttcatcagggacatcatcaaacctgacccacccaagaacttgcagctgaagccattaaagaattctcggcaggtggaggtcagctgggagtaccctgacacctggagtactccacattcctacttctccctgacattctgcgttcaggtccagggcaagagcaagagagaaaagaaagatagagtcttcacggacaagacctcagccacggtcatctgccgcaaaaatgccagcattagcgtgcgggcccaggaccgctactatagctcatcttggagcgaatgggcatctgtgccctgcagtggagggggcggcagcgggggaggcggcagcggcggcgggggatcgagaaacctccccgtggccactccagacccaggaatgttcccatgccttcaccactcccaaaacctgctgagggccgtcagcaacatgctccagaaggccagacaaactctagaattttacccttgcacttctgaagagattgatcatgaagatatcacaaaagataaaaccagcacagtggaggcctgtttaccattggaattaaccaagaatgagagttgcctaaattccagagagacctctttcataactaatgggagttgcctggcctccagaaagacctcttttatgatggccctgtgccttagtagtatttatgaagacttgaagatgtaccaggtggagttcaagaccatgaatgcaaagcttctgatggatcctaagaggcagatctttctagatcaaaacatgctggcagttattgatgagctgatgcaggccctgaatttcaacagtgagactgtgccacaaaaatcctcccttgaagaaccggatttttataaaactaaaatcaagctctgcatacttcttcatgctttcagaattcgggcagtgactattgatagagtgatgagctatctgaatgcttccggaagcggagctactaacttcagcctgctgaagcaggctggagacgtggaggagaaccctggacctatggctcagtcactggctctgagcctccttatcctggttctggcctttggcatccccaggacccaaggcagtgatggaggggctcaggactgttgcctcaagtacagccaaaggaagattcccgccaaggttgtccgcagctaccggaagcaggaaccaagcttaggctgctccatcccagctatcctgttcttgccccgcaagcgctctcaggcagagctatgtgcagacccaaaggagctctgggtgcagcagctgatgcagcatctggacaagacaccatccccacagaaaccagcccagggctgcaggaaggacaggggggcctccaagactggcaagaaaggaaagggctccaaaggctgcaagaggactgagcggtcacagacccctaaagggccaggaagcggagagggcagaggaagtctgctaacatgcggtgacgtcgaggagaatcctggacctatgaaggtctccgcggcagccctcgctgtcatcctcattgctactgccctctgcgctcctgcatctgcctccccatattcctcggacaccacaccctgctgctttgcctacattgcccgcccactgccccgtgcccacatcaaggagtatttctacaccagtggcaagtgctccaacccagcagtcgtctttgtcacccgaaagaaccgccaagtgtgtgccaacccagagaagaaatgggttcgggagtacatcaactctttggagatgagcggaagcggacagtgtactaattatgctctcttgaaattggctggagatgttgagagcaaccctggacctatgacagtgctggcgccagcctggagcccaacaacctatctcctcctgctgctgctgctgagctcgggactcagtgggacccaggactgctccttccaacacagccccatctcctccgacttcgctgtcaaaatccgtgagctgtctgactacctgcttcaagattacccagtcaccgtggcctccaacctccaggacgaggagctctgcgggggcctctggcggctggtcctggcacagcgctggatggagcggctcaagactgtcgctgggtccaagatgcaaggcttgctggagcgcgtgaacacggagatacactttgtcaccaaatgtgcctttcagcccccccccagctgtcttcgcttcgtccagaccaacatctcccgcctcctacaggagacctccgagcagctggtggcgctgaagccctggatcactcgccagaacttctcccggtgcctggagctgcagtgtcagcccgactcctcaaccctgccacccccatggagtccccggcccctggaggccacagccccgtaagctagcttgactgactgagatacagcgtaccttcagctcacagacatgataagatacattgatgagtttggacaaaccacaactagaatgcagtgaaaaaaatgctttatttgtgaaatttgtgatgctattgctttatttgtaaccattataagctgcaataaacaagttaacaacaacaattgcattcattttatgtttcaggttcagggggaggtgtgggaggttttttaaagcaagtaaaacctctacaaatgtggtagtcgtcagctatcctgcaggaacttgtttatttgaaaatcaattcacaaaatccgagtagttattttgcctcccccttcccatttaacagaatacaccaatctctccccacgcacagctttaaacatttggataccattagatatagacatggttttagattccacattccaaacagtttcagagcgagccaatctggggtcagtgatagataaaaatccatcgggatagtcttttaaagcgctttcacagtccaactgctgcggatgcgactccggagtctggatcacggtcatctggaagaagaacgatgggaatcataatccgaaaacggtatcggacgattgtgtctcatcaaacccacaagcagccgctgtctgcgtcgctccgtgcgactgctgtttatgggatcagggtccacagtgtcctgaagcatgattttaatagcccttaacatcaactttctggtgcgatgcgcgcagcaacgcattctgatttcactcaaatctttgcagtaggtacaacacattattacaatattgtttaataaaccataattaaaagcgctccagccaaaactcatatctgatataatcgcccctgcatgaccatcataccaaagtttaatataaattaaatgacgttccctcaaaaacacactacccacatacatgatctcttttggcatgtgcatattaacaatctgtctgtaccatggacaacgttggttaatcatgcaacccaatataaccttccggaaccacactgccaacaccgctcccccagccatgcattgaagtgaaccctgctgattacaatgacaatgaagaacccaattctctcgaccgtgaatcacttgagaatgaaaaatatctatagtggcacaacatagacataaatgcatgcatcttctcataatttttaactcctcaggatttagaaacatatcccagggaataggaagctcttgcagaacagtaaagctggcagaacaaggaagaccacgaacacaacttacactatgcatagtcatagtatcacaatctggcaacagcgggtggtcttcagtcatagaagctcgggtttcattttcctcacaacgtggtaactgggctctggtgtaagggtgatgtctggcgcatgatgtcgagcgtgcgcgcaaccttgtcataatggagttgcttcctgacattctcgtattttgtatagcaaaacgcggccctggcagaacacactcttcttcgccttctatcctgccgcttagcgtgttccgtgtgatagttcaagtacaaccacactcttaagttggtcaaaagaatgctggcttcagttgtaatcaaaactccatcgcatctaatcgttctgaggaaatcatccaagcaatgcaactggattgtgtttcaagcaggagaggagagggaagagacggaagaaccatgttaatttttattccaaacgatctcgcagtacttcaaattgtagatcgcgcagatggcatctctcgcccccactgtgttggtgaaaaagcacagctagatcaaaagaaatgcgattttcaaggtgctcaacggtggcttccagcaaagcctccacgcgcacatccaagaacaaaagaataccaaaagaaggagcattttctaactcctcaatcatcatattacattcctgcaccattcccagataattttcagctttccagccttgaattattcgtgtcagttcttgtggtaaatccaatccacacattacaaacaggtcccggagggcgccctccaccaccattcttaaacacaccctcataatgacaaaatatcttgctcctgtgtcacctgtagcgaattgagaatggcaacatcaattgacatgcccttggctctaagttcttctttaagttctagttgtaaaaactctctcatattatcaccaaactgcttagccagaagccccccgggaacaagagcaggggacgctacagtgcagtacaagcgcagacctccccaattggctccagcaaaaacaagattggaataagcatattgggaaccgccagtaatatcatcgaagttgctggaaatataatcaggcagagtttcttgtaaaaattgaataaaagaaaaatttgccaaaaaaacattcaaaacctctgggatgcaaatgcaataggttaccgcgctgcgctccaacattgttagttttgaattagtctgcaaaaataaaaaaaaaaacaagcgtcatatcatagtagcctgacgaacagatggataaatcagtctttccatcacaagacaagccacagggtctccagctcgaccctcgtaaaacctgtcatcatgattaaacaacagcaccgaaagttcctcgcggtgaccagcatgaataattcttgatgaagcatacaatccagacatgttagcatcagttaacgagaaaaaacagccaacatagcctttgggtataattatgcttaatcgtaagtatagcaaagccacccctcgcggatacaaagtaaaaggcacaggagaataaaaaatataattatttctctgctgctgttcaggcaacgtcgcccccggtccctctaaatacacatacaaagcctcatcagccatggcttaccagacaaagtacagcgggcacacaaagcacaagctctaaagtgactctccaacctctccacaatatatatatacacaagccctaaactgacgtaatgggagtaaagtgtaaaaaatcccgccaaacccaacacacaccccgaaactgcgtcaccagggaaaagtacagtttcacttccgcaatcccaacaggcgtaacttcctctttctcacggtacgtgatatcccactaacttgcaacgtcattttcccacggtcgcaccgccccttttagccgttaaccccacagccaatcaccacacgatccacactttttaaaatcacctcatttacatattggcaccattccatctataaggtatattatatagataga

SEQ ID NO: 81 - DNA, 35884 bp, Artificial Sequence
  Genome sequence of NG-709 virus
tctatctatataatataccttatagatggaatggtgccaatatgtaaatgaggtgattttaaaaagtgtggatcgtgtggtgattggctgtggggttaacggctaaaaggggcggtgcgaccgtgggaaaatgacgttttgtgggggtggagtttttttgcaagttgtcgcgggaaatgtgacgcataaaaaggcttttttctcacggaactacttagttttcccacggtatttaacaggaaatgaggtagttttgaccggatgcaagtgaaaattgttgattttcgcgcgaaaactgaatgaggaagtgtttttctgaataatgtggtatttatggcagggtggagtatttgttcagggccaggtagactttgacccattacgtggaggtttcgattaccgtgttttttacctgaatttccgcgtaccgtgtcaaagtcttctgtttttacgtaggtgtcagctgatcgctagggtatttatacctcagggtttgtgtcaagaggccactcttgagtgccagcgagaagagttttctcctctgcgccggcagtttaataataaaaaaatgagagatttgcgatttctgcctcaggaaataatctctgctgagactggaaatgaaatattggagcttgtggtgcacgccctgatgggagacgatccggagccacctgtgcagctttttgagcctcctacgcttcaggaactgtatgatttagaggtagagggatcggaggattctaatgaggaagctgtaaatggcttttttaccgattctatgcttttagctgctaatgaagggttagaattagatccgcctttggacacttttgatactccaggggtaattgtggaaagcggtacaggtgtaagaaaattacctgatttgagttccgtggactgtgatttgcactgctatgaagacgggtttcctccgagtgatgaggaggaccatgaaaaggagcagtccatgcagactgcagcgggtgagggagtgaaggctgccaatgttggttttcagttggattgcccggagcttcctggacatggctgtaagtcttgtgaatttcacaggaaaaatactggagtaaaggaactgttatgttcgctttgttatatgagaacgcactgccactttatttacagtaagtgtgtttaagttaaaatttaaaggaatatgctgtttttcacatgtatattgagtgtgagttttgtgcttcttattataggtcctgtgtctgatgctgatgaatcaccatctcctgattctactacctcacctcctgagattcaagcacctgttcctgtggacgtgcgcaagcccattcctgtgaagcttaagcctgggaaacgtccagcagtggaaaaacttgaggacttgttacagggtggggacggacctttggacttgagtacacggaaacgtccaagacaataagtgttccatatccgtgtttacttaaggtgacgtcaatatttgtgtgacagtgcaatgtaataaaaatatgttaactgttcactggtttttattgctttttgggcggggactcaggtatataagtagaagcagacctgtgtggttagctcataggagctggctttcatccatggaggtttgggccattttggaagaccttaggaagactaggcaactgttagagaacgcttcggacggagtctccggtttttggagattctggttcgctagtgaattagctagggtagtttttaggataaaacaggactataaacaagaatttgaaaagttgttggtagattgcccaggactttttgaagctcttaatttgggccatcaggttcactttaaagaaaaagttttatcagttttagacttttcaaccccaggtagaactgctgctgctgtggcttttcttacttttatattagataaatggatcccgcagactcatttcagcaggggatacgttttggatttcatagccacagcattgtggagaacatggaaggttcgcaagatgaggacaatcttaggttactggccagtgcagcctttgggtgtagcgggaatcctgaggcatccaccggtcatgccagcggttctggaggaggaacagcaagaggacaacccgagagccggcctggaccctccagtggaggaggcggagtagctgacttgtctcctgaactgcaacgggtgcttactggatctacgtccactggacgggataggggcgttaagagggagagggcatctagtggtactgatgctagatctgagttggctttaagtttaatgagtcgcagacgtcctgaaaccatttggtggcatgaggttcagaaagagggaagggatgaagtttctgtattgcaggagaaatattcactggaacaggtgaaaacatgttggttggagcctgaggatgattgggaggtggccattaaaaattatgccaagatagctttgaggcctgataaacagtataagattactagacggattaatatccggaatgcttgttacatatctggaaatggggctgaggtggtaatagatactcaagacaaggcagttattagatgctgcatgatggatatgtggcctggggtagtcggtatggaagcagtaacttttgtaaatgttaagtttaggggagatggttataatggaatagtgtttatggccaataccaaacttatattgcatggttgtagcttttttggtttcaacaatacctgtgtagatgcctggggacaggttagtgtacggggatgtagtttctatgcgtgttggattgccacagctggcagaaccaagagtcaattgtctctgaagaaatgcatatttcaaagatgtaacctgggcattctgaatgaaggcgaagcaagggtccgccactgcgcttctacagatactggatgttttattttgattaagggaaatgccagcgtaaagcataacatgatttgcggtgcttccgatgagaggccttatcaaatgctcacttgtgctggtgggcattgtaatatgctggctactgtgcatattgtttcccatcaacgcaaaaaatggcctgtttttgatcacaatgtgatgacgaagtgtaccatgcatgcaggtgggcgtagaggaatgtttatgccttaccagtgtaacatgaatcatgtgaaagtgttgttggaaccagatgccttttccagaatgagcctaacaggaatttttgacatgaacatgcaaatctggaagatcctgaggtatgatgatacgagatcgagggtacgcgcatgcgaatgcggaggcaagcatgccaggttccagccggtgtgtgtagatgtgactgaagatctcagaccggatcatttggttattgcccgcactggagcagagttcggatccagtggagaagaaactgactaaggtgagtattgggaaaactttggggtgggattttcagatggacagattgagtaaaaatttgttttttctgtcttgcagctgtcatgagtggaaacgcttcttttaaggggggagtcttcagcccttatctgacagggcgtctcccatcctgggcaggagttcgtcagaatgttatgggatctactgtggatggaagacccgtccaacccgccaattcttcaacgctgacctatgctactttaagttcttcacctttggacgcagctgcagctgccgccgccgcttctgttgccgctaacactgtgcttggaatgggttactatggaagcatcatggctaattccacttcctctaataacccttctaccctgactcaggacaagttacttgtccttttggcccagctggaggctttgacccaacgtctgggtgaactttctcagcaggtggtcgagttgcgagtacaaactgagtctgctgtcggcacggcaaagtctaaataaaaaaatcccagaatcaatgaataaataaacaagcttgttgttgatttaaaatcaagtgtttttatttcatttttcgcgcacggtatgccctagaccaccgatctctatcattgagaactcggtggattttttccaggatcctatagaggtgggattgaatgtttagatacatgggcattaggccgtctttggggtggagatagctccattgaagggattcatgctccggggtagtgttgtaaatcacccagtcataacaaggtcgcagtgcatggtgttgcacaatatcttttagaagtaggctgattgccacagataagcccttggtgtaggtgtttacaaaccggttgagctgggatgggtgcattcggggtgaaattatgtgcattttggattggatttttaagttggcaatattgccgccaagatcccgtcttgggttcatgttatgaaggaccaccaagacggtgtatccggtacatttaggaaatttatcgtgcagcttggatggaaaagcgtggaaaaatttggagacacccttgtgtcctccaagattttccatgcactcatccatgataatagcaatggggccgtgggcagcggcgcgggcaaacacgttccgtgggtctgacacatcatagttatgttcctgagttaaatcatcataagccattttaatgaatttggggcggagagtaccagattggggtatgaatgttccttcgggccccggagcatagttcccctcacagatttgcatttcccaagctttcagttccgagggtggaatcatgtccacctggggggctatgaaaaacaccgtttctggggcgggggtgattaattgtgatgatagcaaatttctgagcaattgagatttgccacatccggtggggccataaatgattccgattacgggttgcaggtggtagtttagggaacggcaactgccgtcttctcgaagcaagggggccacctcgttcatcatttcccttacatgcatattttcccgcaccaaatccattaggaggcgctctcctcctagtgatagaagttcttgtagtgaggaaaagtttttcagcggtttcagaccgtcagccatgggcattttggagagagtttgctgcaaaagttctagtctgttccacagttcagtgatgtgttctatggcatctcgatccagcagacctcctcgtttcgcgggtttggacggctcctggaatagggtatgagacgatgggcgtccagcgctgccagggttcggtccttccagggtctcagtgttcgagtcagggttgtttccgtcacagtgaaggggtgtgcgcctgcttgggcgcttgccagggtgcgcttcagactcatcctgctggtcgaaaacttctgtcgcttggcgccctgtatgtcggccaagtagcagtttaccatgagttcgtagttgagcgcctcggctgcgtggcctttggcgcggagcttacctttggaagttttcttgcataccgggcagtataggcatttcagcgcatacaacttgggcgcaaggaaaacggattctggggagtatgcatctgcgccgcaggaggcgcaaacagtttcacattccaccagccaggttaaatccggttcattggggtcaaaaacaagttttccgccatattttttgatgcgtttcttacctttggtctccatgagttcgtgtcctcgttgagtgacaaacaggctgtccgtgtccccgtagactgattttacaggcctcttctccagtggagtgcctcggtcttcttcgtacaggaactctgaccactctgatacaaaggcgcgcgtccaggccagcacaaaggaggctatgtgggaggggtagcgatcgttgtcaaccagggggtccaccttttccaaagtatgcaaacacatgtcaccctcttcaacatccaggaatgtgattggcttgtaggtgtatttcacgtgacctggggtccccgctgggggggtataaaagggggcggttctttgctcttcctcactgtcttccggatcgctgtccaggaacgtcagctgttggggtaggtattccctctcgaaggcgggcatgacctctgcactcaggttgtcagtttctaagaacgaggaggatttgatattgacagtgccggttgagatgcctttcatgaggttttcgtccatctggtcagaaaacacaatttttttattgtcaagtttggtggcaaatgatccatacagggcgttggataaaagtttggcaatggatcgcatggtttggttcttttccttgtccgcgcgctctttggcggcgatgttgagttggacatactcgcgtgccaggcacttccattcggggaagatagttgttaattcatctggcacgattctcacttgccaccctcgattatgcaaggtaattaaatccacactggtggccacctcgcctcgaaggggttcattggtccaacagagcctacctcctttcctagaacagaaagggggaagtgggtctagcataagttcatcgggagggtctgcatccatggtaaagattcccggaagtaaatccttatcaaaatagctgatgggagtggggtcatctaaggccatttgccattctcgagctgccagtgcgcgctcatatgggttaaggggactgccccatggcatgggatgggtgagtgcagaggcatacatgccacagatgtcatagacgtagatgggatcctcaaagatgcctatgtaggttggatagcatcgcccccctctgatacttgctcgcacatagtcatatagttcatgtgatggcgctagcagccccggacccaagttggtgcgattgggtttttctgttctgtagacgatctggcgaaagatggcgtgagaattggaagagatggtgggtctttgaaaaatgttgaaatgggcatgaggtagacctacagagtctctgacaaagtgggcataagattcttgaagcttggttaccagttcggcggtgacaagtacgtctagggcgcagtagtcaagtgtttcttgaatgatgtcataacctggttggtttttcttttcccacagttcgcggttgagaaggtattcttcgcgatccttccagtactcttctagcggaaacccgtctttgtctgcacggtaagatcctagcatgtagaactgattaactgccttgtaagggcagcagcccttctctacgggtagagagtatgcttgagcagcttttcgtagcgaagcgtgagtaagggcaaaggtgtctctgaccatgactttgaggaattggtatttgaagtcgatgtcgtcacaggctccctgttcccagagttggaagtctacccgtttcttgtaggcggggttgggcaaagcgaaagtaacatcattgaagagaatcttgccggccctgggcatgaaattgcgagtgatgcgaaaaggctgtggtacttccgctcggttattgataacctgggcagctaggacgatctcgtcgaaaccgttgatgttgtgtcctacgatgtataattctatgaaacgcggcgtgcctctgacgtgaggtagcttactgagctcatcaaaggttaggtctgtggggtcagataaggcgtagtgttcgagagcccattcgtgcaggtgaggattcgctttaaggaaggaggaccagaggtccactgccagtgctgtttgtaactggtcccggtactgacgaaaatgccgtccgactgccattttttctggggtgacgcaatagaaggtttgggggtcctgccgccagcgatcccacttgagttttatggcgaggtcataggcgatgttgacgagccgctggtctccagagagtttcatgaccagcatgaaggggattagctgcttgccaaaggaccccatccaggtgtaggtttccacatcgtaggtgagaaagagcctttctgtgcgaggatgagagccaatcgggaagaactggatctcctgccaccagttggaggaatggctgttgatgtgatggaagtagaactccctgcgacgcgccgagcattcatgcttgtgcttgtacagacggccgcagtagtcgcagcgttgcacgggttgtatctcgtgaatgagttgtacctggcttcccttgacgagaaatttcagtgggaagccgaggcctggcgattgtatctcgtgctttactatgttgtctgcatcggcctgttcatcttctgtctcgatggtggtcatgctgacgagccctcgcgggaggcaagtccagacctcggcgcggcaggggcggagctcgaggacgagagcgcgcaggctggagctgtccagggtcctgagacgctgcggactcaggttagtaggcagtgtcaggagattaacttgcatgatcttttggagggcgtgcgggaggttcagatagtacttgatctcaacgggtccgttggtggagatgtcgatggcttgcagggttccgtgtcccttgggcgctaccaccgtgcccttgtttttcattttggacggcggtggctctgttgcttcttgcatgtttagaagcggtgtcgagggcgcgcaccgggcggcaggggcggctcgggacccggcggcatggctggcagtggtacgtcggcgccgcgcgcgggtaggttctggtactgcgccctgagaagactcgcatgcgcgacgacgcggcggttgacatcctggatctgacgcctctgggtgaaagctaccggccccgtgagcttgaacctgaaagagagttcaacagaatcaatctcggtatcgttgacggcggcttgcctaaggatttcttgcacgtcaccagagttgtcctggtaggcgatctccgccatgaactgctcgatctcttcctcttgaagatctccgcggcccgctctctcgacggtggccgcgaggtcgttggagatgcgcccaatgagttgagagaatgcattcatgcccgcctcgttccagacgcggctgtagaccacggcccccacgggatctctcgcgcgcatgaccacctgggcgaggttgagctccacgtggcgggtgaagaccgcatagttgcataggcgctggaaaaggtagttgagtgtggtggcgatgtgctcggtgacgaagaaatacatgatccatcgtctcagcggcatctcgctgacatcgcccagagcttccaagcgctccatggcctcgtagaagtccacggcaaaattaaaaaactgggagtttcgcgcggacacggtcaactcctcttccagaagacggataagttcggcgatggtggtgcgcacctcgcgctcgaaagcccctgggatttcttcctcaatctcttcttcttccactaacatctcttcctcttcaggtggggctgcaggaggagggggaacgcggcgacgccggcggcgcacgggcagacggtcgatgaatctttcaatgacctctccgcggcggcggcgcatggtttcagtgacggcgcggccgttctcgcgcggtcgcagagtaaaaacaccgccgcgcatctccttaaagtggtgactgggaggttctccgtttgggagggagagggcgctgattatacattttattaattggcccgtagggactgcacgcagagatctgatcgtgtcaagatccacgggatctgaaaacctttcgacgaaagcgtctaaccagtcacagtcacaaggtaggctgagtacggcttcttgtgggcgggggtggttatgtgttcggtctgggtcttctgtttcttcttcatctcgggaaggtgagacgatgctgctggtgatgaaattaaagtaggcagttctaagacggcggatggtggcgaggagcaccaggtctttgggtccggcttgctggatacgcaggcgattggccattccccaagcattatcctgacatctagcaagatctttgtagtagtcttgcatgagccgttctacgggcacttcttcctcacccgttctgccatgcatacgtgtgagtccaaatccgcgcattggttgtaccagtgccaagtcagctacgactctttcggcgaggatggcttgctgtacttgggtaagggtggcttgaaagtcatcaaaatccacaaagcggtggtaagctcctgtattaatggtgtaagcacagttggccatgactgaccagttaactgtctggtgaccagggcgcacgagctcggtgtatttaaggcgcgaataggcgcgggtgtcaaagatgtaatcgttgcaggtgcgcaccagatactggtaccctataagaaaatgcggcggtggttggcggtagagaggccatcgttctgtagctggagcgccaggggcgaggtcttccaacataaggcggtgatagccgtagatgtacctggacatccaggtgattcctgcggcggtagtagaagcccgaggaaactcgcgtacgcggttccaaatgttgcgtagcggcatgaagtagttcattgtaggcacggtttgaccagtgaggcgcgcgcagtcattgatgctctatagacacggagaaaatgaaagcgttcagcgactcgactccgtagcctggaggaacgtgaacgggttgggtcgcggtgtaccccggttcgagacttgtactcgagccggccggagccgcggctaacgtggtattggcactcccgtctcgacccagcctacaaaaatccaggatacggaatcgagtcgttttgctggtttccgaatggcagggaagtgagtcctattttttttttttgccgctcagatgcatcccgtgctgcgacagatgcgcccccaacaacagcccccctcgcagcagcagcagcagcaatcacaaaaggctgtccctgcaactactgcaactgccgccgtgagcggtgcgggacagcccgcctatgatctggacttggaagagggcgaaggactggcacgtctaggtgcgccttcacccgagcggcatccgcgagttcaactgaaaaaagattctcgcgaggcgtatgtgccccaacagaacctatttagagacagaagcggcgaggagccggaggagatgcgagcttcccgctttaacgcgggtcgtgagctgcgtcacggtttggaccgaagacgagtgttgcgggacgaggatttcgaagttgatgaaatgacagggatcagtcctgccagggcacacgtggctgcagccaaccttgtatcggcttacgagcagacagtaaaggaagagcgtaacttccaaaagtcttttaataatcatgtgcgaaccctgattgcccgcgaagaagttacccttggtttgatgcatttgtgggatttgatggaagctatcattcagaaccctactagcaaacctctgaccgcccagctgtttctggtggtgcaacacagcagagacaatgaggctttcagagaggcgctgctgaacatcaccgaacccgaggggagatggttgtatgatcttatcaacattctacagagtatcatagtgcaggagcggagcctgggcctggccgagaaggtggctgccatcaattactcggttttgagcttgggaaaatattacgctcgcaaaatctacaagactccatacgttcccatagacaaggaggtgaagatagatgggttctacatgcgcatgacgctcaaggtcttgaccctgagcgatgatcttggggtgtatcgcaatgacagaatgcatcgcgcggttagcgccagcaggaggcgcgagttaagcgacagggaactgatgcacagtttgcaaagagctctgactggagctggaaccgagggtgagaattacttcgacatgggagctgacttgcagtggcagcctagtcgcagggctctgagcgccgcgacggcaggatgtgagcttccttacatagaagaggcggatgaaggcgaggaggaagagggcgagtacttggaagactgatggcacaacccgtgttttttgctagatggaacagcaagcaccggatcccgcaatgcgggcggcgctgcagagccagccgtccggcattaactcctcggacgattggacccaggccatgcaacgtatcatggcgttgacgactcgcaaccccgaagcctttagacagcaaccccaggccaaccgtctatcggccatcatggaagctgtagtgccttcccgctctaatcccactcatgagaaggtcctggccatcgtgaacgcgttggtggagaacaaagctattcgtccagatgaggccggactggtatacaacgctctcttagaacgcgtggctcgctacaacagtagcaatgtgcaaaccaatttggaccgtatgataacagatgtacgcgaagccgtgtctcagcgcgaaaggttccagcgtgatgccaacctgggttcgctggtggcgttaaatgctttcttgagtactcagcctgctaatgtgccgcgtggtcaacaggattatactaactttttaagtgctttgagactgatggtatcagaagtacctcagagcgaagtgtatcagtccggtcctgattacttctttcagactagcagacagggcttgcagacggtaaatctgagccaagcttttaaaaaccttaaaggtttgtggggagtgcatgccccggtaggagaaagagcaaccgtgtctagcttgttaactccgaactcccgcctattattactgttggtagctcctttcaccgacagcggtagcatcgaccgtaattcctatttgggttacctactaaacctgtatcgcgaagccatagggcaaagtcaggtggacgagcagacctatcaagaaattacccaagtcagtcgcgctttgggacaggaagacactggcagtttggaagccactctgaacttcttgcttaccaatcggtctcaaaagatccctcctcaatatgctcttactgcggaggaggagaggatccttagatatgtgcagcagagcgtgggattgtttctgatgcaagagggggcaactccgactgcagcactggacatgacagcgcgaaatatggagcccagcatgtatgccagtaaccgacctttcattaacaaactgctggactacttgcacagagctgccgctatgaactctgattatttcaccaatgccatcttaaacccgcactggctgcccccacctggtttctacacgggcgaatatgacatgcccgaccctaatgacggatttctgtgggacgacgtggacagcgatgttttttcacctctttctgatcatcgcacgtggaaaaaggaaggcggcgatagaatgcattcttctgcatcgctgtccggggtcatgggtgctaccgcggctgagcccgagtctgcaagtccttttcctagtctacccttttctctacacagtgtacgtagcagcgaagtgggtagaataagtcgcccgagtttaatgggcgaagaggagtatctaaacgattccttgctcagaccggcaagagaaaaaaatttcccaaacaatggaatagaaagtttggtggataaaatgagtagatggaagacttatgctcaggatcacagagacgagcctgggatcatggggattacaagtagagcgagccgtagacgccagcgccatgacagacagaggggtcttgtgtgggacgatgaggattcggccgatgatagcagcgtgctggacttgggtgggagaggaaggggcaacccgtttgctcatttgcgccctcgcttgggtggtatgttgtaaaaaaaaataaaaaaaaaactcaccaaggccatggcgacgagcgtacgttcgttcttctttattatctgtgtctagtataatgaggcgagtcgtgctaggcggagcggtggtgtatccggagggtcctcctccttcgtacgagagcgtgatgcagcagcagcaggcgacggcggtgatgcaatccccactggaggctccctttgtgcctccgcgatacctggcacctacggagggcagaaacagcattcgttattcggaactggcacctcagtacgataccaccaggttgtatctggtggacaacaagtcggcggacattgcttctctgaactatcagaatgaccacagcaacttcttgaccacggtggtgcaaaacaatgactttacccctacggaagccagcacccagaccattaactttgatgaacgatcgcggtggggcggtcagctaaagaccatcatgcatactaacatgccaaacgtgaacgagtatatgtttagtaacaagttcaaagcgcgtgtgatggtgtccagaaaacctcccgacggtgctgcagttggggatacttatgatcacaagcaggatattttgaaatatgagtggttcgagtttactttgccagaaggcaacttttcagttactatgactattgatttgatgaacaatgccatcatagataattacttgaaagtgggtagacagaatggagtgcttgaaagtgacattggtgttaagttcgacaccaggaacttcaagctgggatgggatcccgaaaccaagttgatcatgcctggagtgtatacgtatgaagccttccatcctgacattgtcttactgcctggctgcggagtggattttaccgagagtcgtttgagcaaccttcttggtatcagaaaaaaacagccatttcaagagggttttaagattttgtatgaagatttagaaggtggtaatattccggccctcttggatgtagatgcctatgagaacagtaagaaagaacaaaaagccaaaatagaagctgctacagctgctgcagaagctaaggcaaacatagttgccagcgactctacaagggttgctaacgctggagaggtcagaggagacaattttgcgccaacacctgttccgactgcagaatcattattggccgatgtgtctgaaggaacggacgtgaaactcactattcaacctgtagaaaaagatagtaagaatagaagctataatgtgttggaagacaaaatcaacacagcctatcgcagttggtatctttcgtacaattatggcgatcccgaaaaaggagtgcgttcctggacattgctcaccacctcagatgtcacctgcggagcagagcaggtctactggtcgcttccagacatgatgaaggatcctgtcactttccgctccactagacaagtcagtaactaccctgtggtgggtgcagagcttatgcccgtcttctcaaagagcttctacaacgaacaagctgtgtactcccagcagctccgccagtccacctcgcttacgcacgtcttcaaccgctttcctgagaaccagattttaatccgtccgccggcgcccaccattaccaccgtcagtgaaaacgttcctgctctcacagatcacgggaccctgccgttgcgcagcagtatccggggagtccaacgtgtgaccgttactgacgccagacgccgcacctgtccctacgtgtacaaggcactgggcatagtcgcaccgcgcgtcctttcaagccgcactttctaaaaaaaaaaaaaatgtccattcttatctcgcccagtaataacaccggttggggtctgcgcgctccaagcaagatgtacggaggcgcacgcaaacgttctacccaacatcctgtccgtgttcgcggacattttcgcgctccatggggcgccctcaagggccgcactcgcgttcgaaccaccgtcgatgatgtaatcgatcaggtggttgccgacgcccgtaattatactcctactgcgcctacatctactgtggatgcagttattgacagtgtagtggctgacgctcgcaactatgctcgacgtaagagccggcgaaggcgcattgccagacgccaccgagctaccactgccatgcgagccgcaagagctctgctacgaagagctagacgcgtggggcgaagagccatgcttagggcggccagacgtgcagcttcgggcgccagcgccggcaggtcccgcaggcaagcagccgctgtcgcagcggcgactattgccgacatggcccaatcgcgaagaggcaatgtatactgggtgcgtgacgctgccaccggtcaacgtgtacccgtgcgcacccgtccccctcgcacttagaagatactgagcagtctccgatgttgtgtcccagcggcgaggatgtccaagcgcaaatacaaggaagaaatgctgcaggttatcgcacctgaagtctacggccaaccgttgaaggatgaaaaaaaaccccgcaaaatcaagcgggttaaaaaggacaaaaaagaagaggaagatggcgatgatgggctggcggagtttgtgcgcgagtttgccccacggcgacgcgtgcaatggcgtgggcgcaaagttcgacatgtgttgagacctggaacttcggtggtctttacacccggcgagcgttcaagcgctacttttaagcgttcctatgatgaggtgtacggggatgatgatattcttgagcaggcggctgaccgattaggcgagtttgcttatggcaagcgtagtagaataacttccaaggatgagacagtgtcgatacccttggatcatggaaatcccacccctagtcttaaaccggtcactttgcagcaagtgttacccgtaactccgcgaacaggtgttaaacgcgaaggtgaagatttgtatcccactatgcaactgatggtacccaaacgccagaagttggaggacgttttggagaaagtaaaagtggatccagatattcaacctgaggttaaagtgagacccattaagcaggtagcgcctggtctgggggtacaaactgtagacattaagattcccactgaaagtatggaagtgcaaactgaacccgcaaagcctactgccacctccactgaagtgcaaacggatccatggatgcccatgcctattacaactgacgccgccggtcccactcgaagatcccgacgaaagtacggtccagcaagtctgttgatgcccaattatgttgtacacccatctattattcctactcctggttaccgaggcactcgctactatcgcagccgaaacagtacctcccgccgtcgccgcaagacacctgcaaatcgcagtcgtcgccgtagacgcacaagcaaaccgactcccggcgccctggtgcggcaagtgtaccgcaatggtagtgcggaacctttgacactgccgcgtgcgcgttaccatccgagtatcatcacttaatcaatgttgccgctgcctccttgcagatatggccctcacttgtcgccttcgcgttcccatcactggttaccgaggaagaaactcgcgccgtagaagagggatgttgggacgcggaatgcgacgctacaggcgacggcgtgctatccgcaagcaattgcggggtggttttttaccagccttaattccaattatcgctgctgcaattggcgcgataccaggcatagcttccgtggcggttcaggcctcgcaacgacattgacattggaaaaaaacgtataaataaaaaaaaaaaaatacaatggactctgacactcctggtcctgtgactatgttttcttagagatggaagacatcaatttttcatccttggctccgcgacacggcacgaagccgtacatgggcacctggagcgacatcggcacgagccaactgaacgggggcgccttcaattggagcagtatctggagcgggcttaaaaattttggctcaaccataaaaacatacgggaacaaagcttggaacagcagtacaggacaggcgcttagaaataaacttaaagaccagaacttccaacaaaaagtagtcgatgggatagcttccggcatcaatggagtggtagatttggctaaccaggctgtgcagaaaaagataaacagtcgtttggacccgccgccagcaaccccaggtgaaatgcaagtggaggaagaaattcctccgccagaaaaacgaggcgacaagcgtccgcgtcccgatttggaagagacgctggtgacgcgcgtagatgaaccgccttcttatgaggaagcaacgaagcttggaatgcccaccactagaccgatagccccaatggccaccggggtgatgaaaccttctcagttgcatcgacccgtcaccttggatttgccccctccccctgctgctactgctgtacccgcttctaagcctgtcgctgccccgaaaccagtcgccgtagccaggtcacgtcccgggggcgctcctcgtccaaatgcgcactggcaaaatactctgaacagcatcgtgggtctaggcgtgcaaagtgtaaaacgccgtcgctgcttttaattaaatatggagtagcgcttaacttgcctatctgtgtatatgtgtcattacacgccgtcacagcagcagaggaaaaaaggaagaggtcgtgcgtcgacgctgagttactttcaagatggccaccccatcgatgctgccccaatgggcatacatgcacatcgccggacaggatgcttcggagtacctgagtccgggtctggtgcagttcgcccgcgccacagacacctacttcaatctgggaaataagtttagaaatcccaccgtagcgccgacccacgatgtgaccaccgaccgtagccagcggctcatgttgcgcttcgtgcccgttgaccgggaggacaatacatactcttacaaagtgcggtacaccctggccgtgggcgacaacagagtgctggatatggccagcacgttctttgacattaggggtgtgttggacagaggtcccagtttcaaaccctattctggtacggcttacaactccctggctcctaaaggcgctccaaatacatctcagtggattgcagaaggtgtaaaaaatacaactggtgaggaacacgtaacagaagaggaaaccaatactactacttacacttttggcaatgctcctgtaaaagctgaagctgaaattacaaaagaaggactcccagtaggtttggaagtttcagatgaagaaagtaaaccgatttatgctgataaaacatatcagccagaacctcagctgggagatgaaacttggactgaccttgatggaaaaaccgaaaagtatggaggcagggctctcaaacccgatactaagatgaaaccatgctacgggtcctttgccaaacctactaatgtgaaaggcggtcaggcaaaacaaaaaacaacggagcagccaaatcagaaagtcgaatatgatatcgacatggagttttttgatgcggcatcgcagaaaacaaacttaagtcctaaaattgtcatgtatgcagaaaatgtaaatttggaaactccagacactcatgtagtgtacaaacctggaacagaagacacaagttccgaagctaatttgggacaacaatctatgcccaacagacccaactacattggcttcagagataactttattggacttatgtactataacagtactggtaacatgggggtgctggctggtcaagcgtctcagttaaatgcagtggttgacttgcaggacagaaacacagaactttcttaccaactcttgcttgactctctgggcgacagaaccagatactttagcatgtggaatcaggctgtggacagttatgatcctgatgtacgtgttattgaaaatcatggtgtggaagatgaacttcccaactactgttttccactggacggcataggtgttccaacaaccagttacaaatcaatagttccaaatggagacaatgcgcctaattggaaggaacctgaagtaaatggaacaagtgagatcggacagggtaatttgtttgccatggaaattaaccttcaagccaatctatggcgaagtttcctttattccaatgtggctctatatctcccagactcgtacaaatacaccccgtccaatgtcactcttccagaaaacaaaaacacctacgactacatgaacgggcgggtggtgccgccatctctagtagacacctatgtgaacattggtgccaggtggtctctggatgccatggacaatgtcaacccattcaaccaccaccgtaacgctggcttgcgttaccgatccatgcttctgggtaacggacgttatgtgcctttccacatacaagtgcctcaaaaattcttcgctgttaaaaacctgctgcttctcccaggctcctacacttatgagtggaactttaggaaggatgtgaacatggttctacagagttccctcggtaacgacctgcgggtagatggcgccagcatcagtttcacgagcatcaacctctatgctacttttttccccatggctcacaacaccgcttccacccttgaagccatgctgcggaatgacaccaatgatcagtcattcaacgactacctatctgcagctaacatgctctaccccattcctgccaatgcaaccaatattcccatttccattccttctcgcaactgggcggctttcagaggctggtcatttaccagactgaaaaccaaagaaactccctctttggggtctggatttgacccctactttgtctattctggttctattccctacctggatggtaccttctacctgaaccacacttttaagaaggtttccatcatgtttgactcttcagtgagctggcctggaaatgacaggttactatctcctaacgaatttgaaataaagcgcactgtggatggcgaaggctacaacgtagcccaatgcaacatgaccaaagactggttcttggtacagatgctcgccaactacaacatcggctatcagggcttctacattccagaaggatacaaagatcgcatgtattcatttttcagaaacttccagcccatgagcaggcaggtggttgatgaggtcaattacaaagacttcaaggccgtcgccataccctaccaacacaacaactctggctttgtgggttacatggctccgaccatgcgccaaggtcaaccctatcccgctaactatccctatccactcattggaacaactgccgtaaatagtgttacgcagaaaaagttcttgtgtgacagaaccatgtggcgcataccgttctcgagcaacttcatgtctatgggggcccttacagacttgggacagaatatgctctatgccaactcagctcatgctctggacatgacctttgaggtggatcccatggatgagcccaccctgctttatcttctcttcgaagttttcgacgtggtcagagtgcatcagccacaccgcggcatcatcgaggcagtctacctgcgtacaccgttctcggccggtaacgctaccacgtaagaagcttcttgcttcttgcaaatagcagctgcaaccatggcctgcggatcccaaaacggctccagcgagcaagagctcagagccattgtccaagacctgggttgcggaccctattttttgggaacctacgataagcgcttcccggggttcatggcccccgataagctcgcctgtgccattgtaaatacggccggacgtgagacggggggagagcactggttggctttcggttggaacccacgttctaacacctgctacctttttgatccttttggattctcggatgatcgtctcaaacagatttaccagtttgaatatgagggtctcctgcgccgcagcgctcttgctaccaaggaccgctgtattacgctggaaaaatctacccagaccgtgcagggtccccgttctgccgcctgcggacttttctgctgcatgttccttcacgcctttgtgcactggcctgaccgtcccatggacggaaaccccaccatgaaattgctaactggagtgccaaacaacatgcttcattctcctaaagtccagcccaccctgtgtgacaatcaaaaagcactctaccattttcttaatacccattcgccttattttcgctcccatcgtacacacatcgaaagggccactgcgttcgaccgtatggatgttcaataatgactcatgtaaacaacgtgttcaataaacatcactttatttttttacatgtatcaaggctctgcattacttatttatttacaagtcgaatgggttctgacgagaatcagaatgacccgcaggcagtgatacgttgcggaactgatacttgggttgccacttgaattcgggaatcaccaacttgggaaccggtatatcgggcaggatgtcactccacagctttctggtcagctgcaaagctccaagcaggtcaggagccgaaatcttgaaatcacaattaggaccagtgctttgagcgcgagagttgcggtacaccggattgcagcactgaaacaccatcagcgacggatgtctcacgcttgccagcacggtgggatctgcaatcatgcccacatccagatcttcagcattggcaatgctgaacggggtcatcttgcaggtctgcctacccatggcgggcacccaattaggcttgtggttgcaatcgcagtgcagggggatcagtatcatcttggcctgatcctgtctgattcctggatacacggctctcatgaaagcatcatattgcttgaaagcctgctgggctttactaccctcggtataaaacatcccgcaggacctgctcgaaaactggttagctgcacagccggcatcattcacacagcagcgggcgtcattgttagctatttgcaccacacttctgccccagcggttttgggtgattttggttcgctcgggattctcctttaaggctcgttgtccgttctcgctggccacatccatctcgataatctgctccttctgaatcataatattgccatgcaggcacttcagcttgccctcataatcattgcagccatgaggccacaacgcacagcctgtacattcccaattatggtgggcgatctgagaaaaagaatgtatcattccctgcagaaatcttcccatcatcgtgctcagtgtcttgtgactagtgaaagttaactggatgcctcggtgctcctcgtttacgtactggtgacagatgcgcttgtattgttcgtgttgctcaggcattagtttaaaagaggttctaagttcgttatccagcctgtacttctccatcagcagacacatcacttccatgcctttctcccaagcagacaccaggggcaagctaatcggattcttaacagtgcaggcagcagctcctttagccagagggtcatctttagcgatcttctcaatgcttcttttgccatccttctcaacgatgcgcacgggcgggtagctgaaacccactgctacaagttgcgcctcttctctttcttcttcgctgtcttgactgatgtcttgcatggggatatgtttggtcttccttggcttctttttggggggtatcggaggaggaggactgtcgctccgttccggagacagggaggattgtgacgtttcgctcaccattaccaactgactgtcggtagaagaacctgaccccacacggcgacaggtgtttctcttcgggggcagaggtggaggcgattgcgaagggctgcggtccgacctggaaggcggatgactggcagaaccccttccgcgttcgggggtgtgctccctgtggcggtcgcttaactgatttccttcgcggctggccattgtgttctcctaggcagagaaacaacagacatggaaactcagccattgctgtcaacatcgccacgagtgccatcacatctcgtcctcagcgacgaggaaaaggagcagagcttaagcattccaccgcccagtcctgccaccacctctaccctagaagataaggaggtcgacgcatctcatgacatgcagaataaaaaagcgaaagagtctgagacagacatcgagcaagacccgggctatgtgacaccggtggaacacgaggaagagttgaaacgctttctagagagagaggatgaaaactgcccaaaacaacgagcagataactatcaccaagatgctggaaatagggatcagaacaccgactacctcatagggcttgacggggaagacgcgctccttaaacatctagcaagacagtcgctcatagtcaaggatgcattattggacagaactgaagtgcccatcagtgtggaagagctcagccgcgcctacgagcttaacctcttttcacctcgtactccccccaaacgtcagccaaacggcacctgcgagccaaatcctcgcttaaacttttatccagcttttgctgtgccagaagtactggctacctatcacatcttttttaaaaatcaaaaaattccagtctcctgccgcgctaatcgcacccgcgccgatgccctactcaatctgggacctggttcacgcttacctgatatagcttccttggaagaggttccaaagatcttcgagggtctgggcaataatgagactcgggccgcaaatgctctgcaaaagggagaaaatggcatggatgagcatcacagcgttctggtggaattggaaggcgataatgccagactcgcagtactcaagcgaagcatcgaggtcacacacttcgcatatcccgctgtcaacctgccccctaaagtcatgacggcggtcatggaccagttactcattaagcgcgcaagtcccctttcagaagacatgcatgacccagatgcctgtgatgagggtaaaccagtggtcagtgatgagcagctaacccgatggctgggcaccgactctcccagggatttggaagagcgtcgcaagcttatgatggccgtggtgctggttaccgtagaactagagtgtctccgacgtttctttaccgattcagaaaccttgcgcaaactcgaagagaatctgcactacacttttagacacggctttgtgcggcaggcatgcaagatatctaacgtggaactcaccaacctggtttcctacatgggtattctgcatgagaatcgcctaggacaaagcgtgctgcacagcaccctgaagggggaagcccgccgtgattacatccgcgattgtgtctatctgtacctgtgccacacgtggcaaaccggcatgggtgtatggcagcaatgtttagaagaacagaacttgaaagagcttgacaagctcttacagaaatctcttaaggttctgtggacagggttcgacgagcgcaccgtcgcttccgacctggcagacctcatcttcccagagcgtctcagggttactttgcgaaacggattgcctgactttatgagccagagcatgcttaacaattttcgctctttcatcctggaacgctccggtatcctgcccgccacctgctgcgcactgccctccgactttgtgcctctcacctaccgcgagtgccccccgccgctatggagtcactgctacctgttccgtctggccaactatctctcctaccactcggatgtgatcgaggatgtgagcggagacggcttgctggagtgtcactgccgctgcaatctgtgcacgccccaccggtccctagcttgcaacccccagttgatgagcgaaacccagataataggcacctttgaattgcaaggccccagcagccaaggcgatgggtcttctcctgggcaaagtttaaaactgaccccgggactgtggacctccgcctacttgcgcaagtttgctccggaagattaccacccctatgaaatcaagttctatgaggaccaatcacagcctccaaaggccgaactttcggcctgcgtcatcacccagggggcaattctggcccaattgcaagccatccaaaaatcccgccaagaatttctactgaaaaagggtaagggggtctaccttgacccccagaccggcgaggaactcaacacaaggttccctcaggatgtcccaacgacgagaaaacaagaagttgaaggtgcagccgccgcccccagaagatatggaggaagattgggacagtcaggcagaggaggcggaggaggacagtctggaggacagtctggaggaagacagtttggaggaggaaaacgaggaggcagaggaggtggaagaagtaaccgccgacaaacagttatcctcggctgcggagacaagcaacagcgctaccatctccgctccgagtcgaggaacccggcggcgtcccagcagtagatgggacgagaccggacgcttcccgaacccaaccagcgcttccaagaccggtaagaaggatcggcagggatacaagtcctggcgggggcataagaatgccatcatctcctgcttgcatgagtgcgggggcaacatatccttcacgcggcgctacttgctattccaccatggggtgaactttccgcgcaatgttttgcattactaccgtcacctccacagcccctactatagccagcaaatcccggcagtctcgacagataaagacagcggcggcgacctccaacagaaaaccagcagcggcagttagaaaatacacaacaagtgcagcaacaggaggattaaagattacagccaacgagccagcgcaaacccgagagttaagaaatcggatctttccaaccctgtatgccatcttccagcagagtcggggtcaagagcaggaactgaaaataaaaaaccgatctctgcgttcgctcaccagaagttgtttgtatcacaagagcgaagatcaacttcagcgcactctcgaggacgccgaggctctcttcaacaagtactgcgcgctgactcttaaagagtaggcagcgaccgcgcttattcaaaaaaggcgggaattacatcatcctcgacatgagtaaagaaattcccacgccttacatgtggagttatcaaccccaaatgggattggcggcaggcgcctcccaggactactccacccgcatgaattggctcagcgccgggccttctatgatttctcgagttaatgatatacgcgcctaccgaaaccaaatacttttggaacagtcagctcttaccaccacgccccgccaacaccttaatcccagaaattggcccgccgccctagtgtaccaggaaagtcccgctcccaccactgtattacttcctcgagacgcccaggccgaagtccaaatgactaatgcaggtgcgcagttagctggcggctccaccctatgtcgtcacaggcctcggcataatataaaacgcctgatgatcagaggccgaggtatccagctcaacgacgagtcggtgagctctccgcttggtctacgaccagacggaatctttcagattgccggctgcgggagatcttccttcacccctcgtcaggctgttctgactttggaaagttcgtcttcgcaaccccgctcgggcggaatcgggaccgttcaatttgtggaggagtttactccctctgtctacttcaaccccttctccggatctcctgggcattacccggacgagttcataccgaacttcgacgcgattagcgagtcagtggacggctacgattgatgtctggtgacgcggctgagctatctcggctgcgacatctagaccactgccgccgctttcgctgctttgcccgggaactcattgagttcatctacttcgaactccccaaggatcaccctcaaggtccggcccacggagtgcggatttctatcgaaggcaaaatagactctcgcctgcaacgaattttctcccagcggcccgtgctgatcgagcgagaccagggaaacaccacggtttccatctactgcatttgtaatcaccccggattgcatgaaagcctttgctgtcttatgtgtactgagtttaataaaaactgaattaagactctcctacggactgccgcttcttcaacccggattttacaaccagaagaacgaaacttttcctgtcgtccaggactctgttaacttcacctttcctactcacaaactagaagctcaacgactacaccgcttttccagaagcattttccctactaatactactttcaaaaccggaggtgagctccaaggtcttcctacagaaaacccttgggtggaagcgggccttgtagtgctaggaattcttgcgggtgggcttgtgattattctttgctacctatacacaccttgcttcactttcttagtggtgttgtggtattggtttaaaaaatggggcccatactagtcttgcttgttttactttcgcttttggaaccgggttctgccaattacgatccatgtctagacttcgacccagaaaactgcacacttacttttgcacccgacacaagccgcatctgtggagttcatcgcctctcttacgaacttggcccccaacgacaaaaatttacctgcatggtgggaatcaaccccatagttatcacccagcaaagtggagatactaagggttgcattcactgctcctgcgattccatcgagtgcacctacaccctgctgaagaccctatgcggcctaagagacctgctaccaatgaattaaaaaatgattaataaaaaatcacttacttgaaatcagcaataaggtctctgttgaaattttctcccagcagcacctcacttccctcttcccaactctggtattctaaaccccgttcagcggcatactttctccatactttaaaggggatgtcaaattttagctcctctcctgtacccacaatcttcatgtctttcttcccagatgaccaagagagtccggctcagtgactccttcaaccctgtctacccctatgaagatgaaagcacctcccaacacccctttataaacccagggtttatttccccaaatggcttcacacaaagcccaaacggagttcttactttaaaatgtttaaccccactaacaaccacaggcggatctctacagctaaaagtgggagggggacttacagtggatgacaccaacggttttttgaaagaaaacataagtgccaccacaccactcgttaagactggtcactctataggtttaccactaggagccggattgggaacgaatgaaaataaactttgtatcaaattaggacaaggacttacattcaattcaaacaacatttgcattgatgacaatattaacaccttatggacaggagtcaaccccaccgaagccaactgtcaaatcatgaactccagtgaatctaatgattgcaaattaattctaacactagttaaaactggagcactagtcactgcatttgtttatgttataggagtatctaacaattttaatatgctaactacacacagaaatataaattttactgcagagctgtttttcgattctactggtaatttactaactagactctcatccctcaaaactccacttaatcataaatcaggacaaaacatggctactggtgccattactaatgctaaaggtttcatgcccagcacgactgcctatcctttcaatgataattctagagaaaaagaaaactacatttacggaacttgttactacacagctagtgatcgcactgcttttcccattgacatatctgtcatgcttaaccgaagagcaataaatgacgagacatcatattgtattcgtataacttggtcctggaacacaggagatgccccagaggtgcaaacctctgctacaaccctagtcacctccccatttaccttttactacatcagagaagacgactgacaaataaagtttgcgatcgccaggcccaccatggccttgacctttgctttactggtggccctcctggtgctcagctgcaagtcaagctgctctgtgggctgtgatctgcctcaaacccacagcctgggtagcaggaggaccttgatgctcctggcacagatgaggagaatctctcttttctcctgcttgaaggacagacatgactttggatttccccaggaggagtttggcaaccagttccaaaaggctgaaaccatccctgtcctccatgagatgatccagcagatcttcaatctcttcagcacaaaggactcatctgctgcttgggatgagaccctcctagacaaattctacactgaactctaccagcagctgaatgacctggaagcctgtgtgatacagggggtgggggtgacagagactcccctgatgaaggaggactccattctggctgtgaggaaatacttccaaagaatcactctctatctgaaagagaagaaatacagcccttgtgcctgggaggttgtcagagcagaaatcatgagatctttttctttgtcaacaaacttgcaagaaagtttaagaagtaaggaaggaagcggagctactaacttcagcctgctgaagcaggctggagacgtggaggagaaccctggacctatggccctgctactggccctcagcctgctggttctctggacttccccagccccaactctgagtggcaccaatgatgctgaagactgctgcctgtctgtgacccagaaacccatccctgggtacatcgtgaggaacttccactaccttctcatcaaggatggctgcagggtgcctgctgtagtgttcaccacactgaggggccgccagctctgtgcacccccagaccagccctgggtagaacgcatcatccagagactgcagaggacctcagccaagatgaagcgccgcagcagtggaagcggagagggcagaggaagtctgctaacatgcggtgacgtcgaggagaatcctggacctatggctgctgaaccagtagaagacaattgcatcaactttgtggcaatgaaatttattgacaatacgctttactttatagctgaagatgatgaaaacctggaatcagattactttggcaagcttgaatctaaattatcagtcataagaaatttgaatgaccaagttctcttcattgaccaaggaaatcggcctctatttgaagatatgactgattctgactgtagagataatgcaccccggaccatatttattataagtatgtataaagatagccagcctagaggtatggctgtaactatctctgtgaagtgtgagaaaatttcaactctctcctgtgagaacaaaattatttcctttaaggaaatgaatcctcctgataacatcaaggatacaaaaagtgacatcatattctttcagagaagtgtcccaggacatgataataagatgcaatttgaatcttcatcatacgaaggatactttctagcttgtgaaaaagagagagacctttttaaactcattttgaaaaaagaggatgaattgggggatagatctataatgttcactgttcaaaacgaagacggaagcggacagtgtactaattatgctctcttgaaattggctggagatgttgagagcaaccctggacctatgtgtcaccagcagttggtcatctcttggttttccctggtttttctggcatctcccctcgtggccatatgggaactgaagaaagatgtttatgtcgtagaattggattggtatccggatgcccctggagaaatggtggtcctcacctgtgacacccctgaagaagatggtatcacctggaccttggaccagagcagtgaggtcttaggctctggcaaaaccctgaccatccaagtcaaagagtttggagatgctggccagtacacctgtcacaaaggaggcgaggttctaagccattcgctcctgctgcttcacaaaaaggaagatggaatttggtccactgatattttaaaggaccagaaagaacccaaaaataagacctttctaagatgcgaggccaagaattattctggacgtttcacctgctggtggctgacgacaatcagtactgatttgacattcagtgtcaaaagcagcagaggctcttctgacccccaaggggtgacgtgcggagctgctacactctctgcagagagagtcagaggggacaacaaggagtatgagtactcagtggagtgccaggaggacagtgcctgcccagctgctgaggagagtctgcccattgaggtcatggtggatgccgttcacaagctcaagtatgaaaactacaccagcagcttcttcatcagggacatcatcaaacctgacccacccaagaacttgcagctgaagccattaaagaattctcggcaggtggaggtcagctgggagtaccctgacacctggagtactccacattcctacttctccctgacattctgcgttcaggtccagggcaagagcaagagagaaaagaaagatagagtcttcacggacaagacctcagccacggtcatctgccgcaaaaatgccagcattagcgtgcgggcccaggaccgctactatagctcatcttggagcgaatgggcatctgtgccctgcagtggagggggcggcagcgggggaggcggcagcggcggcgggggatcgagaaacctccccgtggccactccagacccaggaatgttcccatgccttcaccactcccaaaacctgctgagggccgtcagcaacatgctccagaaggccagacaaactctagaattttacccttgcacttctgaagagattgatcatgaagatatcacaaaagataaaaccagcacagtggaggcctgtttaccattggaattaaccaagaatgagagttgcctaaattccagagagacctctttcataactaatgggagttgcctggcctccagaaagacctcttttatgatggccctgtgccttagtagtatttatgaagacttgaagatgtaccaggtggagttcaagaccatgaatgcaaagcttctgatggatcctaagaggcagatctttctagatcaaaacatgctggcagttattgatgagctgatgcaggccctgaatttcaacagtgagactgtgccacaaaaatcctcccttgaagaaccggatttttataaaactaaaatcaagctctgcatacttcttcatgctttcagaattcgggcagtgactattgatagagtgatgagctatctgaatgcttcctaagctagcttgactgactgagatacagcgtaccttcagctcacagacatgataagatacattgatgagtttggacaaaccacaactagaatgcagtgaaaaaaatgctttatttgtgaaatttgtgatgctattgctttatttgtaaccattataagctgcaataaacaagttaacaacaacaattgcattcattttatgtttcaggttcagggggaggtgtgggaggttttttaaagcaagtaaaacctctacaaatgtggtagtcgtcagctatcctgcaggaacttgtttatttgaaaatcaattcacaaaatccgagtagttattttgcctcccccttcccatttaacagaatacaccaatctctccccacgcacagctttaaacatttggataccattagatatagacatggttttagattccacattccaaacagtttcagagcgagccaatctggggtcagtgatagataaaaatccatcgggatagtcttttaaagcgctttcacagtccaactgctgcggatgcgactccggagtctggatcacggtcatctggaagaagaacgatgggaatcataatccgaaaacggtatcggacgattgtgtctcatcaaacccacaagcagccgctgtctgcgtcgctccgtgcgactgctgtttatgggatcagggtccacagtgtcctgaagcatgattttaatagcccttaacatcaactttctggtgcgatgcgcgcagcaacgcattctgatttcactcaaatctttgcagtaggtacaacacattattacaatattgtttaataaaccataattaaaagcgctccagccaaaactcatatctgatataatcgcccctgcatgaccatcataccaaagtttaatataaattaaatgacgttccctcaaaaacacactacccacatacatgatctcttttggcatgtgcatattaacaatctgtctgtaccatggacaacgttggttaatcatgcaacccaatataaccttccggaaccacactgccaacaccgctcccccagccatgcattgaagtgaaccctgctgattacaatgacaatgaagaacccaattctctcgaccgtgaatcacttgagaatgaaaaatatctatagtggcacaacatagacataaatgcatgcatcttctcataatttttaactcctcaggatttagaaacatatcccagggaataggaagctcttgcagaacagtaaagctggcagaacaaggaagaccacgaacacaacttacactatgcatagtcatagtatcacaatctggcaacagcgggtggtcttcagtcatagaagctcgggtttcattttcctcacaacgtggtaactgggctctggtgtaagggtgatgtctggcgcatgatgtcgagcgtgcgcgcaaccttgtcataatggagttgcttcctgacattctcgtattttgtatagcaaaacgcggccctggcagaacacactcttcttcgccttctatcctgccgcttagcgtgttccgtgtgatagttcaagtacaaccacactcttaagttggtcaaaagaatgctggcttcagttgtaatcaaaactccatcgcatctaatcgttctgaggaaatcatccaagcaatgcaactggattgtgtttcaagcaggagaggagagggaagagacggaagaaccatgttaatttttattccaaacgatctcgcagtacttcaaattgtagatcgcgcagatggcatctctcgcccccactgtgttggtgaaaaagcacagctagatcaaaagaaatgcgattttcaaggtgctcaacggtggcttccagcaaagcctccacgcgcacatccaagaacaaaagaataccaaaagaaggagcattttctaactcctcaatcatcatattacattcctgcaccattcccagataattttcagctttccagccttgaattattcgtgtcagttcttgtggtaaatccaatccacacattacaaacaggtcccggagggcgccctccaccaccattcttaaacacaccctcataatgacaaaatatcttgctcctgtgtcacctgtagcgaattgagaatggcaacatcaattgacatgcccttggctctaagttcttctttaagttctagttgtaaaaactctctcatattatcaccaaactgcttagccagaagccccccgggaacaagagcaggggacgctacagtgcagtacaagcgcagacctccccaattggctccagcaaaaacaagattggaataagcatattgggaaccgccagtaatatcatcgaagttgctggaaatataatcaggcagagtttcttgtaaaaattgaataaaagaaaaatttgccaaaaaaacattcaaaacctctgggatgcaaatgcaataggttaccgcgctgcgctccaacattgttagttttgaattagtctgcaaaaataaaaaaaaaaacaagcgtcatatcatagtagcctgacgaacagatggataaatcagtctttccatcacaagacaagccacagggtctccagctcgaccctcgtaaaacctgtcatcatgattaaacaacagcaccgaaagttcctcgcggtgaccagcatgaataattcttgatgaagcatacaatccagacatgttagcatcagttaacgagaaaaaacagccaacatagcctttgggtataattatgcttaatcgtaagtatagcaaagccacccctcgcggatacaaagtaaaaggcacaggagaataaaaaatataattatttctctgctgctgttcaggcaacgtcgcccccggtccctctaaatacacatacaaagcctcatcagccatggcttaccagacaaagtacagcgggcacacaaagcacaagctctaaagtgactctccaacctctccacaatatatatatacacaagccctaaactgacgtaatgggagtaaagtgtaaaaaatcccgccaaacccaacacacaccccgaaactgcgtcaccagggaaaagtacagtttcacttccgcaatcccaacaggcgtaacttcctctttctcacggtacgtgatatcccactaacttgcaacgtcattttcccacggtcgcaccgccccttttagccgttaaccccacagccaatcaccacacgatccacactttttaaaatcacctcatttacatattggcaccattccatctataaggtatattatatagataga

SEQ ID NO: 82 - DNA, 36250 bp, Artificial Sequence
  Genome sequence of NG-720 virus
tctatctatataatataccttatagatggaatggtgccaatatgtaaatgaggtgattttaaaaagtgtggatcgtgtggtgattggctgtggggttaacggctaaaaggggcggtgcgaccgtgggaaaatgacgttttgtgggggtggagtttttttgcaagttgtcgcgggaaatgtgacgcataaaaaggcttttttctcacggaactacttagttttcccacggtatttaacaggaaatgaggtagttttgaccggatgcaagtgaaaattgttgattttcgcgcgaaaactgaatgaggaagtgtttttctgaataatgtggtatttatggcagggtggagtatttgttcagggccaggtagactttgacccattacgtggaggtttcgattaccgtgttttttacctgaatttccgcgtaccgtgtcaaagtcttctgtttttacgtaggtgtcagctgatcgctagggtatttatacctcagggtttgtgtcaagaggccactcttgagtgccagcgagaagagttttctcctctgcgccggcagtttaataataaaaaaatgagagatttgcgatttctgcctcaggaaataatctctgctgagactggaaatgaaatattggagcttgtggtgcacgccctgatgggagacgatccggagccacctgtgcagctttttgagcctcctacgcttcaggaactgtatgatttagaggtagagggatcggaggattctaatgaggaagctgtaaatggcttttttaccgattctatgcttttagctgctaatgaagggttagaattagatccgcctttggacacttttgatactccaggggtaattgtggaaagcggtacaggtgtaagaaaattacctgatttgagttccgtggactgtgatttgcactgctatgaagacgggtttcctccgagtgatgaggaggaccatgaaaaggagcagtccatgcagactgcagcgggtgagggagtgaaggctgccaatgttggttttcagttggattgcccggagcttcctggacatggctgtaagtcttgtgaatttcacaggaaaaatactggagtaaaggaactgttatgttcgctttgttatatgagaacgcactgccactttatttacagtaagtgtgtttaagttaaaatttaaaggaatatgctgtttttcacatgtatattgagtgtgagttttgtgcttcttattataggtcctgtgtctgatgctgatgaatcaccatctcctgattctactacctcacctcctgagattcaagcacctgttcctgtggacgtgcgcaagcccattcctgtgaagcttaagcctgggaaacgtccagcagtggaaaaacttgaggacttgttacagggtggggacggacctttggacttgagtacacggaaacgtccaagacaataagtgttccatatccgtgtttacttaaggtgacgtcaatatttgtgtgacagtgcaatgtaataaaaatatgttaactgttcactggtttttattgctttttgggcggggactcaggtatataagtagaagcagacctgtgtggttagctcataggagctggctttcatccatggaggtttgggccattttggaagaccttaggaagactaggcaactgttagagaacgcttcggacggagtctccggtttttggagattctggttcgctagtgaattagctagggtagtttttaggataaaacaggactataaacaagaatttgaaaagttgttggtagattgcccaggactttttgaagctcttaatttgggccatcaggttcactttaaagaaaaagttttatcagttttagacttttcaaccccaggtagaactgctgctgctgtggcttttcttacttttatattagataaatggatcccgcagactcatttcagcaggggatacgttttggatttcatagccacagcattgtggagaacatggaaggttcgcaagatgaggacaatcttaggttactggccagtgcagcctttgggtgtagcgggaatcctgaggcatccaccggtcatgccagcggttctggaggaggaacagcaagaggacaacccgagagccggcctggaccctccagtggaggaggcggagtagctgacttgtctcctgaactgcaacgggtgcttactggatctacgtccactggacgggataggggcgttaagagggagagggcatctagtggtactgatgctagatctgagttggctttaagtttaatgagtcgcagacgtcctgaaaccatttggtggcatgaggttcagaaagagggaagggatgaagtttctgtattgcaggagaaatattcactggaacaggtgaaaacatgttggttggagcctgaggatgattgggaggtggccattaaaaattatgccaagatagctttgaggcctgataaacagtataagattactagacggattaatatccggaatgcttgttacatatctggaaatggggctgaggtggtaatagatactcaagacaaggcagttattagatgctgcatgatggatatgtggcctggggtagtcggtatggaagcagtaacttttgtaaatgttaagtttaggggagatggttataatggaatagtgtttatggccaataccaaacttatattgcatggttgtagcttttttggtttcaacaatacctgtgtagatgcctggggacaggttagtgtacggggatgtagtttctatgcgtgttggattgccacagctggcagaaccaagagtcaattgtctctgaagaaatgcatatttcaaagatgtaacctgggcattctgaatgaaggcgaagcaagggtccgccactgcgcttctacagatactggatgttttattttgattaagggaaatgccagcgtaaagcataacatgatttgcggtgcttccgatgagaggccttatcaaatgctcacttgtgctggtgggcattgtaatatgctggctactgtgcatattgtttcccatcaacgcaaaaaatggcctgtttttgatcacaatgtgatgacgaagtgtaccatgcatgcaggtgggcgtagaggaatgtttatgccttaccagtgtaacatgaatcatgtgaaagtgttgttggaaccagatgccttttccagaatgagcctaacaggaatttttgacatgaacatgcaaatctggaagatcctgaggtatgatgatacgagatcgagggtacgcgcatgcgaatgcggaggcaagcatgccaggttccagccggtgtgtgtagatgtgactgaagatctcagaccggatcatttggttattgcccgcactggagcagagttcggatccagtggagaagaaactgactaaggtgagtattgggaaaactttggggtgggattttcagatggacagattgagtaaaaatttgttttttctgtcttgcagctgtcatgagtggaaacgcttcttttaaggggggagtcttcagcccttatctgacagggcgtctcccatcctgggcaggagttcgtcagaatgttatgggatctactgtggatggaagacccgtccaacccgccaattcttcaacgctgacctatgctactttaagttcttcacctttggacgcagctgcagctgccgccgccgcttctgttgccgctaacactgtgcttggaatgggttactatggaagcatcatggctaattccacttcctctaataacccttctaccctgactcaggacaagttacttgtccttttggcccagctggaggctttgacccaacgtctgggtgaactttctcagcaggtggtcgagttgcgagtacaaactgagtctgctgtcggcacggcaaagtctaaataaaaaaatcccagaatcaatgaataaataaacaagcttgttgttgatttaaaatcaagtgtttttatttcatttttcgcgcacggtatgccctagaccaccgatctctatcattgagaactcggtggattttttccaggatcctatagaggtgggattgaatgtttagatacatgggcattaggccgtctttggggtggagatagctccattgaagggattcatgctccggggtagtgttgtaaatcacccagtcataacaaggtcgcagtgcatggtgttgcacaatatcttttagaagtaggctgattgccacagataagcccttggtgtaggtgtttacaaaccggttgagctgggatgggtgcattcggggtgaaattatgtgcattttggattggatttttaagttggcaatattgccgccaagatcccgtcttgggttcatgttatgaaggaccaccaagacggtgtatccggtacatttaggaaatttatcgtgcagcttggatggaaaagcgtggaaaaatttggagacacccttgtgtcctccaagattttccatgcactcatccatgataatagcaatggggccgtgggcagcggcgcgggcaaacacgttccgtgggtctgacacatcatagttatgttcctgagttaaatcatcataagccattttaatgaatttggggcggagagtaccagattggggtatgaatgttccttcgggccccggagcatagttcccctcacagatttgcatttcccaagctttcagttccgagggtggaatcatgtccacctggggggctatgaaaaacaccgtttctggggcgggggtgattaattgtgatgatagcaaatttctgagcaattgagatttgccacatccggtggggccataaatgattccgattacgggttgcaggtggtagtttagggaacggcaactgccgtcttctcgaagcaagggggccacctcgttcatcatttcccttacatgcatattttcccgcaccaaatccattaggaggcgctctcctcctagtgatagaagttcttgtagtgaggaaaagtttttcagcggtttcagaccgtcagccatgggcattttggagagagtttgctgcaaaagttctagtctgttccacagttcagtgatgtgttctatggcatctcgatccagcagacctcctcgtttcgcgggtttggacggctcctggaatagggtatgagacgatgggcgtccagcgctgccagggttcggtccttccagggtctcagtgttcgagtcagggttgtttccgtcacagtgaaggggtgtgcgcctgcttgggcgcttgccagggtgcgcttcagactcatcctgctggtcgaaaacttctgtcgcttggcgccctgtatgtcggccaagtagcagtttaccatgagttcgtagttgagcgcctcggctgcgtggcctttggcgcggagcttacctttggaagttttcttgcataccgggcagtataggcatttcagcgcatacaacttgggcgcaaggaaaacggattctggggagtatgcatctgcgccgcaggaggcgcaaacagtttcacattccaccagccaggttaaatccggttcattggggtcaaaaacaagttttccgccatattttttgatgcgtttcttacctttggtctccatgagttcgtgtcctcgttgagtgacaaacaggctgtccgtgtccccgtagactgattttacaggcctcttctccagtggagtgcctcggtcttcttcgtacaggaactctgaccactctgatacaaaggcgcgcgtccaggccagcacaaaggaggctatgtgggaggggtagcgatcgttgtcaaccagggggtccaccttttccaaagtatgcaaacacatgtcaccctcttcaacatccaggaatgtgattggcttgtaggtgtatttcacgtgacctggggtccccgctgggggggtataaaagggggcggttctttgctcttcctcactgtcttccggatcgctgtccaggaacgtcagctgttggggtaggtattccctctcgaaggcgggcatgacctctgcactcaggttgtcagtttctaagaacgaggaggatttgatattgacagtgccggttgagatgcctttcatgaggttttcgtccatctggtcagaaaacacaatttttttattgtcaagtttggtggcaaatgatccatacagggcgttggataaaagtttggcaatggatcgcatggtttggttcttttccttgtccgcgcgctctttggcggcgatgttgagttggacatactcgcgtgccaggcacttccattcggggaagatagttgttaattcatctggcacgattctcacttgccaccctcgattatgcaaggtaattaaatccacactggtggccacctcgcctcgaaggggttcattggtccaacagagcctacctcctttcctagaacagaaagggggaagtgggtctagcataagttcatcgggagggtctgcatccatggtaaagattcccggaagtaaatccttatcaaaatagctgatgggagtggggtcatctaaggccatttgccattctcgagctgccagtgcgcgctcatatgggttaaggggactgccccatggcatgggatgggtgagtgcagaggcatacatgccacagatgtcatagacgtagatgggatcctcaaagatgcctatgtaggttggatagcatcgcccccctctgatacttgctcgcacatagtcatatagttcatgtgatggcgctagcagccccggacccaagttggtgcgattgggtttttctgttctgtagacgatctggcgaaagatggcgtgagaattggaagagatggtgggtctttgaaaaatgttgaaatgggcatgaggtagacctacagagtctctgacaaagtgggcataagattcttgaagcttggttaccagttcggcggtgacaagtacgtctagggcgcagtagtcaagtgtttcttgaatgatgtcataacctggttggtttttcttttcccacagttcgcggttgagaaggtattcttcgcgatccttccagtactcttctagcggaaacccgtctttgtctgcacggtaagatcctagcatgtagaactgattaactgccttgtaagggcagcagcccttctctacgggtagagagtatgcttgagcagcttttcgtagcgaagcgtgagtaagggcaaaggtgtctctgaccatgactttgaggaattggtatttgaagtcgatgtcgtcacaggctccctgttcccagagttggaagtctacccgtttcttgtaggcggggttgggcaaagcgaaagtaacatcattgaagagaatcttgccggccctgggcatgaaattgcgagtgatgcgaaaaggctgtggtacttccgctcggttattgataacctgggcagctaggacgatctcgtcgaaaccgttgatgttgtgtcctacgatgtataattctatgaaacgcggcgtgcctctgacgtgaggtagcttactgagctcatcaaaggttaggtctgtggggtcagataaggcgtagtgttcgagagcccattcgtgcaggtgaggattcgctttaaggaaggaggaccagaggtccactgccagtgctgtttgtaactggtcccggtactgacgaaaatgccgtccgactgccattttttctggggtgacgcaatagaaggtttgggggtcctgccgccagcgatcccacttgagttttatggcgaggtcataggcgatgttgacgagccgctggtctccagagagtttcatgaccagcatgaaggggattagctgcttgccaaaggaccccatccaggtgtaggtttccacatcgtaggtgagaaagagcctttctgtgcgaggatgagagccaatcgggaagaactggatctcctgccaccagttggaggaatggctgttgatgtgatggaagtagaactccctgcgacgcgccgagcattcatgcttgtgcttgtacagacggccgcagtagtcgcagcgttgcacgggttgtatctcgtgaatgagttgtacctggcttcccttgacgagaaatttcagtgggaagccgaggcctggcgattgtatctcgtgctttactatgttgtctgcatcggcctgttcatcttctgtctcgatggtggtcatgctgacgagccctcgcgggaggcaagtccagacctcggcgcggcaggggcggagctcgaggacgagagcgcgcaggctggagctgtccagggtcctgagacgctgcggactcaggttagtaggcagtgtcaggagattaacttgcatgatcttttggagggcgtgcgggaggttcagatagtacttgatctcaacgggtccgttggtggagatgtcgatggcttgcagggttccgtgtcccttgggcgctaccaccgtgcccttgtttttcattttggacggcggtggctctgttgcttcttgcatgtttagaagcggtgtcgagggcgcgcaccgggcggcaggggcggctcgggacccggcggcatggctggcagtggtacgtcggcgccgcgcgcgggtaggttctggtactgcgccctgagaagactcgcatgcgcgacgacgcggcggttgacatcctggatctgacgcctctgggtgaaagctaccggccccgtgagcttgaacctgaaagagagttcaacagaatcaatctcggtatcgttgacggcggcttgcctaaggatttcttgcacgtcaccagagttgtcctggtaggcgatctccgccatgaactgctcgatctcttcctcttgaagatctccgcggcccgctctctcgacggtggccgcgaggtcgttggagatgcgcccaatgagttgagagaatgcattcatgcccgcctcgttccagacgcggctgtagaccacggcccccacgggatctctcgcgcgcatgaccacctgggcgaggttgagctccacgtggcgggtgaagaccgcatagttgcataggcgctggaaaaggtagttgagtgtggtggcgatgtgctcggtgacgaagaaatacatgatccatcgtctcagcggcatctcgctgacatcgcccagagcttccaagcgctccatggcctcgtagaagtccacggcaaaattaaaaaactgggagtttcgcgcggacacggtcaactcctcttccagaagacggataagttcggcgatggtggtgcgcacctcgcgctcgaaagcccctgggatttcttcctcaatctcttcttcttccactaacatctcttcctcttcaggtggggctgcaggaggagggggaacgcggcgacgccggcggcgcacgggcagacggtcgatgaatctttcaatgacctctccgcggcggcggcgcatggtttcagtgacggcgcggccgttctcgcgcggtcgcagagtaaaaacaccgccgcgcatctccttaaagtggtgactgggaggttctccgtttgggagggagagggcgctgattatacattttattaattggcccgtagggactgcacgcagagatctgatcgtgtcaagatccacgggatctgaaaacctttcgacgaaagcgtctaaccagtcacagtcacaaggtaggctgagtacggcttcttgtgggcgggggtggttatgtgttcggtctgggtcttctgtttcttcttcatctcgggaaggtgagacgatgctgctggtgatgaaattaaagtaggcagttctaagacggcggatggtggcgaggagcaccaggtctttgggtccggcttgctggatacgcaggcgattggccattccccaagcattatcctgacatctagcaagatctttgtagtagtcttgcatgagccgttctacgggcacttcttcctcacccgttctgccatgcatacgtgtgagtccaaatccgcgcattggttgtaccagtgccaagtcagctacgactctttcggcgaggatggcttgctgtacttgggtaagggtggcttgaaagtcatcaaaatccacaaagcggtggtaagctcctgtattaatggtgtaagcacagttggccatgactgaccagttaactgtctggtgaccagggcgcacgagctcggtgtatttaaggcgcgaataggcgcgggtgtcaaagatgtaatcgttgcaggtgcgcaccagatactggtaccctataagaaaatgcggcggtggttggcggtagagaggccatcgttctgtagctggagcgccaggggcgaggtcttccaacataaggcggtgatagccgtagatgtacctggacatccaggtgattcctgcggcggtagtagaagcccgaggaaactcgcgtacgcggttccaaatgttgcgtagcggcatgaagtagttcattgtaggcacggtttgaccagtgaggcgcgcgcagtcattgatgctctatagacacggagaaaatgaaagcgttcagcgactcgactccgtagcctggaggaacgtgaacgggttgggtcgcggtgtaccccggttcgagacttgtactcgagccggccggagccgcggctaacgtggtattggcactcccgtctcgacccagcctacaaaaatccaggatacggaatcgagtcgttttgctggtttccgaatggcagggaagtgagtcctattttttttttttgccgctcagatgcatcccgtgctgcgacagatgcgcccccaacaacagcccccctcgcagcagcagcagcagcaatcacaaaaggctgtccctgcaactactgcaactgccgccgtgagcggtgcgggacagcccgcctatgatctggacttggaagagggcgaaggactggcacgtctaggtgcgccttcacccgagcggcatccgcgagttcaactgaaaaaagattctcgcgaggcgtatgtgccccaacagaacctatttagagacagaagcggcgaggagccggaggagatgcgagcttcccgctttaacgcgggtcgtgagctgcgtcacggtttggaccgaagacgagtgttgcgggacgaggatttcgaagttgatgaaatgacagggatcagtcctgccagggcacacgtggctgcagccaaccttgtatcggcttacgagcagacagtaaaggaagagcgtaacttccaaaagtcttttaataatcatgtgcgaaccctgattgcccgcgaagaagttacccttggtttgatgcatttgtgggatttgatggaagctatcattcagaaccctactagcaaacctctgaccgcccagctgtttctggtggtgcaacacagcagagacaatgaggctttcagagaggcgctgctgaacatcaccgaacccgaggggagatggttgtatgatcttatcaacattctacagagtatcatagtgcaggagcggagcctgggcctggccgagaaggtggctgccatcaattactcggttttgagcttgggaaaatattacgctcgcaaaatctacaagactccatacgttcccatagacaaggaggtgaagatagatgggttctacatgcgcatgacgctcaaggtcttgaccctgagcgatgatcttggggtgtatcgcaatgacagaatgcatcgcgcggttagcgccagcaggaggcgcgagttaagcgacagggaactgatgcacagtttgcaaagagctctgactggagctggaaccgagggtgagaattacttcgacatgggagctgacttgcagtggcagcctagtcgcagggctctgagcgccgcgacggcaggatgtgagcttccttacatagaagaggcggatgaaggcgaggaggaagagggcgagtacttggaagactgatggcacaacccgtgttttttgctagatggaacagcaagcaccggatcccgcaatgcgggcggcgctgcagagccagccgtccggcattaactcctcggacgattggacccaggccatgcaacgtatcatggcgttgacgactcgcaaccccgaagcctttagacagcaaccccaggccaaccgtctatcggccatcatggaagctgtagtgccttcccgctctaatcccactcatgagaaggtcctggccatcgtgaacgcgttggtggagaacaaagctattcgtccagatgaggccggactggtatacaacgctctcttagaacgcgtggctcgctacaacagtagcaatgtgcaaaccaatttggaccgtatgataacagatgtacgcgaagccgtgtctcagcgcgaaaggttccagcgtgatgccaacctgggttcgctggtggcgttaaatgctttcttgagtactcagcctgctaatgtgccgcgtggtcaacaggattatactaactttttaagtgctttgagactgatggtatcagaagtacctcagagcgaagtgtatcagtccggtcctgattacttctttcagactagcagacagggcttgcagacggtaaatctgagccaagcttttaaaaaccttaaaggtttgtggggagtgcatgccccggtaggagaaagagcaaccgtgtctagcttgttaactccgaactcccgcctattattactgttggtagctcctttcaccgacagcggtagcatcgaccgtaattcctatttgggttacctactaaacctgtatcgcgaagccatagggcaaagtcaggtggacgagcagacctatcaagaaattacccaagtcagtcgcgctttgggacaggaagacactggcagtttggaagccactctgaacttcttgcttaccaatcggtctcaaaagatccctcctcaatatgctcttactgcggaggaggagaggatccttagatatgtgcagcagagcgtgggattgtttctgatgcaagagggggcaactccgactgcagcactggacatgacagcgcgaaatatggagcccagcatgtatgccagtaaccgacctttcattaacaaactgctggactacttgcacagagctgccgctatgaactctgattatttcaccaatgccatcttaaacccgcactggctgcccccacctggtttctacacgggcgaatatgacatgcccgaccctaatgacggatttctgtgggacgacgtggacagcgatgttttttcacctctttctgatcatcgcacgtggaaaaaggaaggcggcgatagaatgcattcttctgcatcgctgtccggggtcatgggtgctaccgcggctgagcccgagtctgcaagtccttttcctagtctacccttttctctacacagtgtacgtagcagcgaagtgggtagaataagtcgcccgagtttaatgggcgaagaggagtatctaaacgattccttgctcagaccggcaagagaaaaaaatttcccaaacaatggaatagaaagtttggtggataaaatgagtagatggaagacttatgctcaggatcacagagacgagcctgggatcatggggattacaagtagagcgagccgtagacgccagcgccatgacagacagaggggtcttgtgtgggacgatgaggattcggccgatgatagcagcgtgctggacttgggtgggagaggaaggggcaacccgtttgctcatttgcgccctcgcttgggtggtatgttgtaaaaaaaaataaaaaaaaaactcaccaaggccatggcgacgagcgtacgttcgttcttctttattatctgtgtctagtataatgaggcgagtcgtgctaggcggagcggtggtgtatccggagggtcctcctccttcgtacgagagcgtgatgcagcagcagcaggcgacggcggtgatgcaatccccactggaggctccctttgtgcctccgcgatacctggcacctacggagggcagaaacagcattcgttattcggaactggcacctcagtacgataccaccaggttgtatctggtggacaacaagtcggcggacattgcttctctgaactatcagaatgaccacagcaacttcttgaccacggtggtgcaaaacaatgactttacccctacggaagccagcacccagaccattaactttgatgaacgatcgcggtggggcggtcagctaaagaccatcatgcatactaacatgccaaacgtgaacgagtatatgtttagtaacaagttcaaagcgcgtgtgatggtgtccagaaaacctcccgacggtgctgcagttggggatacttatgatcacaagcaggatattttgaaatatgagtggttcgagtttactttgccagaaggcaacttttcagttactatgactattgatttgatgaacaatgccatcatagataattacttgaaagtgggtagacagaatggagtgcttgaaagtgacattggtgttaagttcgacaccaggaacttcaagctgggatgggatcccgaaaccaagttgatcatgcctggagtgtatacgtatgaagccttccatcctgacattgtcttactgcctggctgcggagtggattttaccgagagtcgtttgagcaaccttcttggtatcagaaaaaaacagccatttcaagagggttttaagattttgtatgaagatttagaaggtggtaatattccggccctcttggatgtagatgcctatgagaacagtaagaaagaacaaaaagccaaaatagaagctgctacagctgctgcagaagctaaggcaaacatagttgccagcgactctacaagggttgctaacgctggagaggtcagaggagacaattttgcgccaacacctgttccgactgcagaatcattattggccgatgtgtctgaaggaacggacgtgaaactcactattcaacctgtagaaaaagatagtaagaatagaagctataatgtgttggaagacaaaatcaacacagcctatcgcagttggtatctttcgtacaattatggcgatcccgaaaaaggagtgcgttcctggacattgctcaccacctcagatgtcacctgcggagcagagcaggtctactggtcgcttccagacatgatgaaggatcctgtcactttccgctccactagacaagtcagtaactaccctgtggtgggtgcagagcttatgcccgtcttctcaaagagcttctacaacgaacaagctgtgtactcccagcagctccgccagtccacctcgcttacgcacgtcttcaaccgctttcctgagaaccagattttaatccgtccgccggcgcccaccattaccaccgtcagtgaaaacgttcctgctctcacagatcacgggaccctgccgttgcgcagcagtatccggggagtccaacgtgtgaccgttactgacgccagacgccgcacctgtccctacgtgtacaaggcactgggcatagtcgcaccgcgcgtcctttcaagccgcactttctaaaaaaaaaaaaaatgtccattcttatctcgcccagtaataacaccggttggggtctgcgcgctccaagcaagatgtacggaggcgcacgcaaacgttctacccaacatcctgtccgtgttcgcggacattttcgcgctccatggggcgccctcaagggccgcactcgcgttcgaaccaccgtcgatgatgtaatcgatcaggtggttgccgacgcccgtaattatactcctactgcgcctacatctactgtggatgcagttattgacagtgtagtggctgacgctcgcaactatgctcgacgtaagagccggcgaaggcgcattgccagacgccaccgagctaccactgccatgcgagccgcaagagctctgctacgaagagctagacgcgtggggcgaagagccatgcttagggcggccagacgtgcagcttcgggcgccagcgccggcaggtcccgcaggcaagcagccgctgtcgcagcggcgactattgccgacatggcccaatcgcgaagaggcaatgtatactgggtgcgtgacgctgccaccggtcaacgtgtacccgtgcgcacccgtccccctcgcacttagaagatactgagcagtctccgatgttgtgtcccagcggcgaggatgtccaagcgcaaatacaaggaagaaatgctgcaggttatcgcacctgaagtctacggccaaccgttgaaggatgaaaaaaaaccccgcaaaatcaagcgggttaaaaaggacaaaaaagaagaggaagatggcgatgatgggctggcggagtttgtgcgcgagtttgccccacggcgacgcgtgcaatggcgtgggcgcaaagttcgacatgtgttgagacctggaacttcggtggtctttacacccggcgagcgttcaagcgctacttttaagcgttcctatgatgaggtgtacggggatgatgatattcttgagcaggcggctgaccgattaggcgagtttgcttatggcaagcgtagtagaataacttccaaggatgagacagtgtcgatacccttggatcatggaaatcccacccctagtcttaaaccggtcactttgcagcaagtgttacccgtaactccgcgaacaggtgttaaacgcgaaggtgaagatttgtatcccactatgcaactgatggtacccaaacgccagaagttggaggacgttttggagaaagtaaaagtggatccagatattcaacctgaggttaaagtgagacccattaagcaggtagcgcctggtctgggggtacaaactgtagacattaagattcccactgaaagtatggaagtgcaaactgaacccgcaaagcctactgccacctccactgaagtgcaaacggatccatggatgcccatgcctattacaactgacgccgccggtcccactcgaagatcccgacgaaagtacggtccagcaagtctgttgatgcccaattatgttgtacacccatctattattcctactcctggttaccgaggcactcgctactatcgcagccgaaacagtacctcccgccgtcgccgcaagacacctgcaaatcgcagtcgtcgccgtagacgcacaagcaaaccgactcccggcgccctggtgcggcaagtgtaccgcaatggtagtgcggaacctttgacactgccgcgtgcgcgttaccatccgagtatcatcacttaatcaatgttgccgctgcctccttgcagatatggccctcacttgtcgccttcgcgttcccatcactggttaccgaggaagaaactcgcgccgtagaagagggatgttgggacgcggaatgcgacgctacaggcgacggcgtgctatccgcaagcaattgcggggtggttttttaccagccttaattccaattatcgctgctgcaattggcgcgataccaggcatagcttccgtggcggttcaggcctcgcaacgacattgacattggaaaaaaacgtataaataaaaaaaaaaaaatacaatggactctgacactcctggtcctgtgactatgttttcttagagatggaagacatcaatttttcatccttggctccgcgacacggcacgaagccgtacatgggcacctggagcgacatcggcacgagccaactgaacgggggcgccttcaattggagcagtatctggagcgggcttaaaaattttggctcaaccataaaaacatacgggaacaaagcttggaacagcagtacaggacaggcgcttagaaataaacttaaagaccagaacttccaacaaaaagtagtcgatgggatagcttccggcatcaatggagtggtagatttggctaaccaggctgtgcagaaaaagataaacagtcgtttggacccgccgccagcaaccccaggtgaaatgcaagtggaggaagaaattcctccgccagaaaaacgaggcgacaagcgtccgcgtcccgatttggaagagacgctggtgacgcgcgtagatgaaccgccttcttatgaggaagcaacgaagcttggaatgcccaccactagaccgatagccccaatggccaccggggtgatgaaaccttctcagttgcatcgacccgtcaccttggatttgccccctccccctgctgctactgctgtacccgcttctaagcctgtcgctgccccgaaaccagtcgccgtagccaggtcacgtcccgggggcgctcctcgtccaaatgcgcactggcaaaatactctgaacagcatcgtgggtctaggcgtgcaaagtgtaaaacgccgtcgctgcttttaattaaatatggagtagcgcttaacttgcctatctgtgtatatgtgtcattacacgccgtcacagcagcagaggaaaaaaggaagaggtcgtgcgtcgacgctgagttactttcaagatggccaccccatcgatgctgccccaatgggcatacatgcacatcgccggacaggatgcttcggagtacctgagtccgggtctggtgcagttcgcccgcgccacagacacctacttcaatctgggaaataagtttagaaatcccaccgtagcgccgacccacgatgtgaccaccgaccgtagccagcggctcatgttgcgcttcgtgcccgttgaccgggaggacaatacatactcttacaaagtgcggtacaccctggccgtgggcgacaacagagtgctggatatggccagcacgttctttgacattaggggtgtgttggacagaggtcccagtttcaaaccctattctggtacggcttacaactccctggctcctaaaggcgctccaaatacatctcagtggattgcagaaggtgtaaaaaatacaactggtgaggaacacgtaacagaagaggaaaccaatactactacttacacttttggcaatgctcctgtaaaagctgaagctgaaattacaaaagaaggactcccagtaggtttggaagtttcagatgaagaaagtaaaccgatttatgctgataaaacatatcagccagaacctcagctgggagatgaaacttggactgaccttgatggaaaaaccgaaaagtatggaggcagggctctcaaacccgatactaagatgaaaccatgctacgggtcctttgccaaacctactaatgtgaaaggcggtcaggcaaaacaaaaaacaacggagcagccaaatcagaaagtcgaatatgatatcgacatggagttttttgatgcggcatcgcagaaaacaaacttaagtcctaaaattgtcatgtatgcagaaaatgtaaatttggaaactccagacactcatgtagtgtacaaacctggaacagaagacacaagttccgaagctaatttgggacaacaatctatgcccaacagacccaactacattggcttcagagataactttattggacttatgtactataacagtactggtaacatgggggtgctggctggtcaagcgtctcagttaaatgcagtggttgacttgcaggacagaaacacagaactttcttaccaactcttgcttgactctctgggcgacagaaccagatactttagcatgtggaatcaggctgtggacagttatgatcctgatgtacgtgttattgaaaatcatggtgtggaagatgaacttcccaactactgttttccactggacggcataggtgttccaacaaccagttacaaatcaatagttccaaatggagacaatgcgcctaattggaaggaacctgaagtaaatggaacaagtgagatcggacagggtaatttgtttgccatggaaattaaccttcaagccaatctatggcgaagtttcctttattccaatgtggctctatatctcccagactcgtacaaatacaccccgtccaatgtcactcttccagaaaacaaaaacacctacgactacatgaacgggcgggtggtgccgccatctctagtagacacctatgtgaacattggtgccaggtggtctctggatgccatggacaatgtcaacccattcaaccaccaccgtaacgctggcttgcgttaccgatccatgcttctgggtaacggacgttatgtgcctttccacatacaagtgcctcaaaaattcttcgctgttaaaaacctgctgcttctcccaggctcctacacttatgagtggaactttaggaaggatgtgaacatggttctacagagttccctcggtaacgacctgcgggtagatggcgccagcatcagtttcacgagcatcaacctctatgctacttttttccccatggctcacaacaccgcttccacccttgaagccatgctgcggaatgacaccaatgatcagtcattcaacgactacctatctgcagctaacatgctctaccccattcctgccaatgcaaccaatattcccatttccattccttctcgcaactgggcggctttcagaggctggtcatttaccagactgaaaaccaaagaaactccctctttggggtctggatttgacccctactttgtctattctggttctattccctacctggatggtaccttctacctgaaccacacttttaagaaggtttccatcatgtttgactcttcagtgagctggcctggaaatgacaggttactatctcctaacgaatttgaaataaagcgcactgtggatggcgaaggctacaacgtagcccaatgcaacatgaccaaagactggttcttggtacagatgctcgccaactacaacatcggctatcagggcttctacattccagaaggatacaaagatcgcatgtattcatttttcagaaacttccagcccatgagcaggcaggtggttgatgaggtcaattacaaagacttcaaggccgtcgccataccctaccaacacaacaactctggctttgtgggttacatggctccgaccatgcgccaaggtcaaccctatcccgctaactatccctatccactcattggaacaactgccgtaaatagtgttacgcagaaaaagttcttgtgtgacagaaccatgtggcgcataccgttctcgagcaacttcatgtctatgggggcccttacagacttgggacagaatatgctctatgccaactcagctcatgctctggacatgacctttgaggtggatcccatggatgagcccaccctgctttatcttctcttcgaagttttcgacgtggtcagagtgcatcagccacaccgcggcatcatcgaggcagtctacctgcgtacaccgttctcggccggtaacgctaccacgtaagaagcttcttgcttcttgcaaatagcagctgcaaccatggcctgcggatcccaaaacggctccagcgagcaagagctcagagccattgtccaagacctgggttgcggaccctattttttgggaacctacgataagcgcttcccggggttcatggcccccgataagctcgcctgtgccattgtaaatacggccggacgtgagacggggggagagcactggttggctttcggttggaacccacgttctaacacctgctacctttttgatccttttggattctcggatgatcgtctcaaacagatttaccagtttgaatatgagggtctcctgcgccgcagcgctcttgctaccaaggaccgctgtattacgctggaaaaatctacccagaccgtgcagggtccccgttctgccgcctgcggacttttctgctgcatgttccttcacgcctttgtgcactggcctgaccgtcccatggacggaaaccccaccatgaaattgctaactggagtgccaaacaacatgcttcattctcctaaagtccagcccaccctgtgtgacaatcaaaaagcactctaccattttcttaatacccattcgccttattttcgctcccatcgtacacacatcgaaagggccactgcgttcgaccgtatggatgttcaataatgactcatgtaaacaacgtgttcaataaacatcactttatttttttacatgtatcaaggctctgcattacttatttatttacaagtcgaatgggttctgacgagaatcagaatgacccgcaggcagtgatacgttgcggaactgatacttgggttgccacttgaattcgggaatcaccaacttgggaaccggtatatcgggcaggatgtcactccacagctttctggtcagctgcaaagctccaagcaggtcaggagccgaaatcttgaaatcacaattaggaccagtgctttgagcgcgagagttgcggtacaccggattgcagcactgaaacaccatcagcgacggatgtctcacgcttgccagcacggtgggatctgcaatcatgcccacatccagatcttcagcattggcaatgctgaacggggtcatcttgcaggtctgcctacccatggcgggcacccaattaggcttgtggttgcaatcgcagtgcagggggatcagtatcatcttggcctgatcctgtctgattcctggatacacggctctcatgaaagcatcatattgcttgaaagcctgctgggctttactaccctcggtataaaacatcccgcaggacctgctcgaaaactggttagctgcacagccggcatcattcacacagcagcgggcgtcattgttagctatttgcaccacacttctgccccagcggttttgggtgattttggttcgctcgggattctcctttaaggctcgttgtccgttctcgctggccacatccatctcgataatctgctccttctgaatcataatattgccatgcaggcacttcagcttgccctcataatcattgcagccatgaggccacaacgcacagcctgtacattcccaattatggtgggcgatctgagaaaaagaatgtatcattccctgcagaaatcttcccatcatcgtgctcagtgtcttgtgactagtgaaagttaactggatgcctcggtgctcctcgtttacgtactggtgacagatgcgcttgtattgttcgtgttgctcaggcattagtttaaaagaggttctaagttcgttatccagcctgtacttctccatcagcagacacatcacttccatgcctttctcccaagcagacaccaggggcaagctaatcggattcttaacagtgcaggcagcagctcctttagccagagggtcatctttagcgatcttctcaatgcttcttttgccatccttctcaacgatgcgcacgggcgggtagctgaaacccactgctacaagttgcgcctcttctctttcttcttcgctgtcttgactgatgtcttgcatggggatatgtttggtcttccttggcttctttttggggggtatcggaggaggaggactgtcgctccgttccggagacagggaggattgtgacgtttcgctcaccattaccaactgactgtcggtagaagaacctgaccccacacggcgacaggtgtttctcttcgggggcagaggtggaggcgattgcgaagggctgcggtccgacctggaaggcggatgactggcagaaccccttccgcgttcgggggtgtgctccctgtggcggtcgcttaactgatttccttcgcggctggccattgtgttctcctaggcagagaaacaacagacatggaaactcagccattgctgtcaacatcgccacgagtgccatcacatctcgtcctcagcgacgaggaaaaggagcagagcttaagcattccaccgcccagtcctgccaccacctctaccctagaagataaggaggtcgacgcatctcatgacatgcagaataaaaaagcgaaagagtctgagacagacatcgagcaagacccgggctatgtgacaccggtggaacacgaggaagagttgaaacgctttctagagagagaggatgaaaactgcccaaaacaacgagcagataactatcaccaagatgctggaaatagggatcagaacaccgactacctcatagggcttgacggggaagacgcgctccttaaacatctagcaagacagtcgctcatagtcaaggatgcattattggacagaactgaagtgcccatcagtgtggaagagctcagccgcgcctacgagcttaacctcttttcacctcgtactccccccaaacgtcagccaaacggcacctgcgagccaaatcctcgcttaaacttttatccagcttttgctgtgccagaagtactggctacctatcacatcttttttaaaaatcaaaaaattccagtctcctgccgcgctaatcgcacccgcgccgatgccctactcaatctgggacctggttcacgcttacctgatatagcttccttggaagaggttccaaagatcttcgagggtctgggcaataatgagactcgggccgcaaatgctctgcaaaagggagaaaatggcatggatgagcatcacagcgttctggtggaattggaaggcgataatgccagactcgcagtactcaagcgaagcatcgaggtcacacacttcgcatatcccgctgtcaacctgccccctaaagtcatgacggcggtcatggaccagttactcattaagcgcgcaagtcccctttcagaagacatgcatgacccagatgcctgtgatgagggtaaaccagtggtcagtgatgagcagctaacccgatggctgggcaccgactctcccagggatttggaagagcgtcgcaagcttatgatggccgtggtgctggttaccgtagaactagagtgtctccgacgtttctttaccgattcagaaaccttgcgcaaactcgaagagaatctgcactacacttttagacacggctttgtgcggcaggcatgcaagatatctaacgtggaactcaccaacctggtttcctacatgggtattctgcatgagaatcgcctaggacaaagcgtgctgcacagcaccctgaagggggaagcccgccgtgattacatccgcgattgtgtctatctgtacctgtgccacacgtggcaaaccggcatgggtgtatggcagcaatgtttagaagaacagaacttgaaagagcttgacaagctcttacagaaatctcttaaggttctgtggacagggttcgacgagcgcaccgtcgcttccgacctggcagacctcatcttcccagagcgtctcagggttactttgcgaaacggattgcctgactttatgagccagagcatgcttaacaattttcgctctttcatcctggaacgctccggtatcctgcccgccacctgctgcgcactgccctccgactttgtgcctctcacctaccgcgagtgccccccgccgctatggagtcactgctacctgttccgtctggccaactatctctcctaccactcggatgtgatcgaggatgtgagcggagacggcttgctggagtgtcactgccgctgcaatctgtgcacgccccaccggtccctagcttgcaacccccagttgatgagcgaaacccagataataggcacctttgaattgcaaggccccagcagccaaggcgatgggtcttctcctgggcaaagtttaaaactgaccccgggactgtggacctccgcctacttgcgcaagtttgctccggaagattaccacccctatgaaatcaagttctatgaggaccaatcacagcctccaaaggccgaactttcggcctgcgtcatcacccagggggcaattctggcccaattgcaagccatccaaaaatcccgccaagaatttctactgaaaaagggtaagggggtctaccttgacccccagaccggcgaggaactcaacacaaggttccctcaggatgtcccaacgacgagaaaacaagaagttgaaggtgcagccgccgcccccagaagatatggaggaagattgggacagtcaggcagaggaggcggaggaggacagtctggaggacagtctggaggaagacagtttggaggaggaaaacgaggaggcagaggaggtggaagaagtaaccgccgacaaacagttatcctcggctgcggagacaagcaacagcgctaccatctccgctccgagtcgaggaacccggcggcgtcccagcagtagatgggacgagaccggacgcttcccgaacccaaccagcgcttccaagaccggtaagaaggatcggcagggatacaagtcctggcgggggcataagaatgccatcatctcctgcttgcatgagtgcgggggcaacatatccttcacgcggcgctacttgctattccaccatggggtgaactttccgcgcaatgttttgcattactaccgtcacctccacagcccctactatagccagcaaatcccggcagtctcgacagataaagacagcggcggcgacctccaacagaaaaccagcagcggcagttagaaaatacacaacaagtgcagcaacaggaggattaaagattacagccaacgagccagcgcaaacccgagagttaagaaatcggatctttccaaccctgtatgccatcttccagcagagtcggggtcaagagcaggaactgaaaataaaaaaccgatctctgcgttcgctcaccagaagttgtttgtatcacaagagcgaagatcaacttcagcgcactctcgaggacgccgaggctctcttcaacaagtactgcgcgctgactcttaaagagtaggcagcgaccgcgcttattcaaaaaaggcgggaattacatcatcctcgacatgagtaaagaaattcccacgccttacatgtggagttatcaaccccaaatgggattggcggcaggcgcctcccaggactactccacccgcatgaattggctcagcgccgggccttctatgatttctcgagttaatgatatacgcgcctaccgaaaccaaatacttttggaacagtcagctcttaccaccacgccccgccaacaccttaatcccagaaattggcccgccgccctagtgtaccaggaaagtcccgctcccaccactgtattacttcctcgagacgcccaggccgaagtccaaatgactaatgcaggtgcgcagttagctggcggctccaccctatgtcgtcacaggcctcggcataatataaaacgcctgatgatcagaggccgaggtatccagctcaacgacgagtcggtgagctctccgcttggtctacgaccagacggaatctttcagattgccggctgcgggagatcttccttcacccctcgtcaggctgttctgactttggaaagttcgtcttcgcaaccccgctcgggcggaatcgggaccgttcaatttgtggaggagtttactccctctgtctacttcaaccccttctccggatctcctgggcattacccggacgagttcataccgaacttcgacgcgattagcgagtcagtggacggctacgattgatgtctggtgacgcggctgagctatctcggctgcgacatctagaccactgccgccgctttcgctgctttgcccgggaactcattgagttcatctacttcgaactccccaaggatcaccctcaaggtccggcccacggagtgcggatttctatcgaaggcaaaatagactctcgcctgcaacgaattttctcccagcggcccgtgctgatcgagcgagaccagggaaacaccacggtttccatctactgcatttgtaatcaccccggattgcatgaaagcctttgctgtcttatgtgtactgagtttaataaaaactgaattaagactctcctacggactgccgcttcttcaacccggattttacaaccagaagaacgaaacttttcctgtcgtccaggactctgttaacttcacctttcctactcacaaactagaagctcaacgactacaccgcttttccagaagcattttccctactaatactactttcaaaaccggaggtgagctccaaggtcttcctacagaaaacccttgggtggaagcgggccttgtagtgctaggaattcttgcgggtgggcttgtgattattctttgctacctatacacaccttgcttcactttcttagtggtgttgtggtattggtttaaaaaatggggcccatactagtcttgcttgttttactttcgcttttggaaccgggttctgccaattacgatccatgtctagacttcgacccagaaaactgcacacttacttttgcacccgacacaagccgcatctgtggagttcatcgcctctcttacgaacttggcccccaacgacaaaaatttacctgcatggtgggaatcaaccccatagttatcacccagcaaagtggagatactaagggttgcattcactgctcctgcgattccatcgagtgcacctacaccctgctgaagaccctatgcggcctaagagacctgctaccaatgaattaaaaaatgattaataaaaaatcacttacttgaaatcagcaataaggtctctgttgaaattttctcccagcagcacctcacttccctcttcccaactctggtattctaaaccccgttcagcggcatactttctccatactttaaaggggatgtcaaattttagctcctctcctgtacccacaatcttcatgtctttcttcccagatgaccaagagagtccggctcagtgactccttcaaccctgtctacccctatgaagatgaaagcacctcccaacacccctttataaacccagggtttatttccccaaatggcttcacacaaagcccaaacggagttcttactttaaaatgtttaaccccactaacaaccacaggcggatctctacagctaaaagtgggagggggacttacagtggatgacaccaacggttttttgaaagaaaacataagtgccaccacaccactcgttaagactggtcactctataggtttaccactaggagccggattgggaacgaatgaaaataaactttgtatcaaattaggacaaggacttacattcaattcaaacaacatttgcattgatgacaatattaacaccttatggacaggagtcaaccccaccgaagccaactgtcaaatcatgaactccagtgaatctaatgattgcaaattaattctaacactagttaaaactggagcactagtcactgcatttgtttatgttataggagtatctaacaattttaatatgctaactacacacagaaatataaattttactgcagagctgtttttcgattctactggtaatttactaactagactctcatccctcaaaactccacttaatcataaatcaggacaaaacatggctactggtgccattactaatgctaaaggtttcatgcccagcacgactgcctatcctttcaatgataattctagagaaaaagaaaactacatttacggaacttgttactacacagctagtgatcgcactgcttttcccattgacatatctgtcatgcttaaccgaagagcaataaatgacgagacatcatattgtattcgtataacttggtcctggaacacaggagatgccccagaggtgcaaacctctgctacaaccctagtcacctccccatttaccttttactacatcagagaagacgactgacaaataaagtttgcgatcgccaggcccaccatgtgtcaccagcagttggtcatctcttggttttccctggtttttctggcatctcccctcgtggccatatgggaactgaagaaagatgtttatgtcgtagaattggattggtatccggatgcccctggagaaatggtggtcctcacctgtgacacccctgaagaagatggtatcacctggaccttggaccagagcagtgaggtcttaggctctggcaaaaccctgaccatccaagtcaaagagtttggagatgctggccagtacacctgtcacaaaggaggcgaggttctaagccattcgctcctgctgcttcacaaaaaggaagatggaatttggtccactgatattttaaaggaccagaaagaacccaaaaataagacctttctaagatgcgaggccaagaattattctggacgtttcacctgctggtggctgacgacaatcagtactgatttgacattcagtgtcaaaagcagcagaggctcttctgacccccaaggggtgacgtgcggagctgctacactctctgcagagagagtcagaggggacaacaaggagtatgagtactcagtggagtgccaggaggacagtgcctgcccagctgctgaggagagtctgcccattgaggtcatggtggatgccgttcacaagctcaagtatgaaaactacaccagcagcttcttcatcagggacatcatcaaacctgacccacccaagaacttgcagctgaagccattaaagaattctcggcaggtggaggtcagctgggagtaccctgacacctggagtactccacattcctacttctccctgacattctgcgttcaggtccagggcaagagcaagagagaaaagaaagatagagtcttcacggacaagacctcagccacggtcatctgccgcaaaaatgccagcattagcgtgcgggcccaggaccgctactatagctcatcttggagcgaatgggcatctgtgccctgcagtggagggggcggcagcgggggaggcggcagcggcggcgggggatcgagaaacctccccgtggccactccagacccaggaatgttcccatgccttcaccactcccaaaacctgctgagggccgtcagcaacatgctccagaaggccagacaaactctagaattttacccttgcacttctgaagagattgatcatgaagatatcacaaaagataaaaccagcacagtggaggcctgtttaccattggaattaaccaagaatgagagttgcctaaattccagagagacctctttcataactaatgggagttgcctggcctccagaaagacctcttttatgatggccctgtgccttagtagtatttatgaagacttgaagatgtaccaggtggagttcaagaccatgaatgcaaagcttctgatggatcctaagaggcagatctttctagatcaaaacatgctggcagttattgatgagctgatgcaggccctgaatttcaacagtgagactgtgccacaaaaatcctcccttgaagaaccggatttttataaaactaaaatcaagctctgcatacttcttcatgctttcagaattcgggcagtgactattgatagagtgatgagctatctgaatgcttccggaagcggagctactaacttcagcctgctgaagcaggctggagacgtggaggagaaccctggacctgactggacctggcgcatcctgttcttggtggcagctgctacgggagctcattccaactgggtgaatgtaataagtgatttgaaaaaaattgaagatcttattcaatctatgcatattgatgctactttatatacggaaagtgatgttcaccccagttgcaaagtaacagcaatgaagtgctttctcttggagttacaagttatttcacttgagtccggagatgcaagtattcatgatacagtagaaaatctgatcatcctagcaaacaacagtttgtcttctaatgggaatgtaacagaatctggatgcaaagaatgtgaggaactggaggaaaaaaatattaaagaatttttgcagagttttgtacatattgtccaaatgttcatcaacacttctggaagcggagagggcagaggaagtctgctaacatgcggtgacgtcgaggagaatcctggacctaagaaaagtggtgttcttttcctcttgggcatcatcttgctggttctgattggagtgcaaggaaccccagtagtgagaaagggtcgctgttcctgcatcagcaccaaccaagggactatccacctacaatccttgaaagaccttaaacaatttgccccaagcccttcctgcgagaaaattgaaatcattgctacactgaagaatggagttcaaacatgtctaaacccagattcagcagatgtgaaggaactgattaaaaagtgggagaaacaggtcagccaaaagaaaaagcaaaagaatgggaaaaaacatcaaaaaaagaaagttctgaaagttcgaaaatctcaacgttctcgtcaaaagaagactacaggaagcggacagtgtactaattatgctctcttgaaattggctggagatgttgagagcaaccctggacctgctcagtcactggctctgagcctccttatcctggttctggcctttggcatccccaggacccaaggcagtgatggaggggctcaggactgttgcctcaagtacagccaaaggaagattcccgccaaggttgtccgcagctaccggaagcaggaaccaagcttaggctgctccatcccagctatcctgttcttgccccgcaagcgctctcaggcagagctatgtgcagacccaaaggagctctgggtgcagcagctgatgcagcatctggacaagacaccatccccacagaaaccagcccagggctgcaggaaggacaggggggcctccaagactggcaagaaaggaaagggctccaaaggctgcaagaggactgagcggtcacagacccctaaagggccaggaagcggagtgaaacagactttgaattttgaccttctcaagttggcgggagacgtggagtccaaccctggacctgccttgacctttgctttactggtggccctcctggtgctcagctgcaagtcaagctgctctgtgggctgtgatctgcctcaaacccacagcctgggtagcaggaggaccttgatgctcctggcacagatgaggagaatctctcttttctcctgcttgaaggacagacatgactttggatttccccaggaggagtttggcaaccagttccaaaaggctgaaaccatccctgtcctccatgagatgatccagcagatcttcaatctcttcagcacaaaggactcatctgctgcttgggatgagaccctcctagacaaattctacactgaactctaccagcagctgaatgacctggaagcctgtgtgatacagggggtgggggtgacagagactcccctgatgaaggaggactccattctggctgtgaggaaatacttccaaagaatcactctctatctgaaagagaagaaatacagcccttgtgcctgggaggttgtcagagcagaaatcatgagatctttttctttgtcaacaaacttgcaagaaagtttaagaagtaaggaataagctagcttgactgactgagatacagcgtaccttcagctcacagacatgataagatacattgatgagtttggacaaaccacaactagaatgcagtgaaaaaaatgctttatttgtgaaatttgtgatgctattgctttatttgtaaccattataagctgcaataaacaagttaacaacaacaattgcattcattttatgtttcaggttcagggggaggtgtgggaggttttttaaagcaagtaaaacctctacaaatgtggtagtcgtcagctatcctgcaggaacttgtttatttgaaaatcaattcacaaaatccgagtagttattttgcctcccccttcccatttaacagaatacaccaatctctccccacgcacagctttaaacatttggataccattagatatagacatggttttagattccacattccaaacagtttcagagcgagccaatctggggtcagtgatagataaaaatccatcgggatagtcttttaaagcgctttcacagtccaactgctgcggatgcgactccggagtctggatcacggtcatctggaagaagaacgatgggaatcataatccgaaaacggtatcggacgattgtgtctcatcaaacccacaagcagccgctgtctgcgtcgctccgtgcgactgctgtttatgggatcagggtccacagtgtcctgaagcatgattttaatagcccttaacatcaactttctggtgcgatgcgcgcagcaacgcattctgatttcactcaaatctttgcagtaggtacaacacattattacaatattgtttaataaaccataattaaaagcgctccagccaaaactcatatctgatataatcgcccctgcatgaccatcataccaaagtttaatataaattaaatgacgttccctcaaaaacacactacccacatacatgatctcttttggcatgtgcatattaacaatctgtctgtaccatggacaacgttggttaatcatgcaacccaatataaccttccggaaccacactgccaacaccgctcccccagccatgcattgaagtgaaccctgctgattacaatgacaatgaagaacccaattctctcgaccgtgaatcacttgagaatgaaaaatatctatagtggcacaacatagacataaatgcatgcatcttctcataatttttaactcctcaggatttagaaacatatcccagggaataggaagctcttgcagaacagtaaagctggcagaacaaggaagaccacgaacacaacttacactatgcatagtcatagtatcacaatctggcaacagcgggtggtcttcagtcatagaagctcgggtttcattttcctcacaacgtggtaactgggctctggtgtaagggtgatgtctggcgcatgatgtcgagcgtgcgcgcaaccttgtcataatggagttgcttcctgacattctcgtattttgtatagcaaaacgcggccctggcagaacacactcttcttcgccttctatcctgccgcttagcgtgttccgtgtgatagttcaagtacaaccacactcttaagttggtcaaaagaatgctggcttcagttgtaatcaaaactccatcgcatctaatcgttctgaggaaatcatccaagcaatgcaactggattgtgtttcaagcaggagaggagagggaagagacggaagaaccatgttaatttttattccaaacgatctcgcagtacttcaaattgtagatcgcgcagatggcatctctcgcccccactgtgttggtgaaaaagcacagctagatcaaaagaaatgcgattttcaaggtgctcaacggtggcttccagcaaagcctccacgcgcacatccaagaacaaaagaataccaaaagaaggagcattttctaactcctcaatcatcatattacattcctgcaccattcccagataattttcagctttccagccttgaattattcgtgtcagttcttgtggtaaatccaatccacacattacaaacaggtcccggagggcgccctccaccaccattcttaaacacaccctcataatgacaaaatatcttgctcctgtgtcacctgtagcgaattgagaatggcaacatcaattgacatgcccttggctctaagttcttctttaagttctagttgtaaaaactctctcatattatcaccaaactgcttagccagaagccccccgggaacaagagcaggggacgctacagtgcagtacaagcgcagacctccccaattggctccagcaaaaacaagattggaataagcatattgggaaccgccagtaatatcatcgaagttgctggaaatataatcaggcagagtttcttgtaaaaattgaataaaagaaaaatttgccaaaaaaacattcaaaacctctgggatgcaaatgcaataggttaccgcgctgcgctccaacattgttagttttgaattagtctgcaaaaataaaaaaaaaaacaagcgtcatatcatagtagcctgacgaacagatggataaatcagtctttccatcacaagacaagccacagggtctccagctcgaccctcgtaaaacctgtcatcatgattaaacaacagcaccgaaagttcctcgcggtgaccagcatgaataattcttgatgaagcatacaatccagacatgttagcatcagttaacgagaaaaaacagccaacatagcctttgggtataattatgcttaatcgtaagtatagcaaagccacccctcgcggatacaaagtaaaaggcacaggagaataaaaaatataattatttctctgctgctgttcaggcaacgtcgcccccggtccctctaaatacacatacaaagcctcatcagccatggcttaccagacaaagtacagcgggcacacaaagcacaagctctaaagtgactctccaacctctccacaatatatatatacacaagccctaaactgacgtaatgggagtaaagtgtaaaaaatcccgccaaacccaacacacaccccgaaactgcgtcaccagggaaaagtacagtttcacttccgcaatcccaacaggcgtaacttcctctttctcacggtacgtgatatcccactaacttgcaacgtcattttcccacggtcgcaccgccccttttagccgttaaccccacagccaatcaccacacgatccacactttttaaaatcacctcatttacatattggcaccattccatctataaggtatattatatagataga

SEQ ID NO: 83 - DNA, 36154 bp, Artificial Sequence
  Genome sequence of NG-721 virus
tctatctatataatataccttatagatggaatggtgccaatatgtaaatgaggtgattttaaaaagtgtggatcgtgtggtgattggctgtggggttaacggctaaaaggggcggtgcgaccgtgggaaaatgacgttttgtgggggtggagtttttttgcaagttgtcgcgggaaatgtgacgcataaaaaggcttttttctcacggaactacttagttttcccacggtatttaacaggaaatgaggtagttttgaccggatgcaagtgaaaattgttgattttcgcgcgaaaactgaatgaggaagtgtttttctgaataatgtggtatttatggcagggtggagtatttgttcagggccaggtagactttgacccattacgtggaggtttcgattaccgtgttttttacctgaatttccgcgtaccgtgtcaaagtcttctgtttttacgtaggtgtcagctgatcgctagggtatttatacctcagggtttgtgtcaagaggccactcttgagtgccagcgagaagagttttctcctctgcgccggcagtttaataataaaaaaatgagagatttgcgatttctgcctcaggaaataatctctgctgagactggaaatgaaatattggagcttgtggtgcacgccctgatgggagacgatccggagccacctgtgcagctttttgagcctcctacgcttcaggaactgtatgatttagaggtagagggatcggaggattctaatgaggaagctgtaaatggcttttttaccgattctatgcttttagctgctaatgaagggttagaattagatccgcctttggacacttttgatactccaggggtaattgtggaaagcggtacaggtgtaagaaaattacctgatttgagttccgtggactgtgatttgcactgctatgaagacgggtttcctccgagtgatgaggaggaccatgaaaaggagcagtccatgcagactgcagcgggtgagggagtgaaggctgccaatgttggttttcagttggattgcccggagcttcctggacatggctgtaagtcttgtgaatttcacaggaaaaatactggagtaaaggaactgttatgttcgctttgttatatgagaacgcactgccactttatttacagtaagtgtgtttaagttaaaatttaaaggaatatgctgtttttcacatgtatattgagtgtgagttttgtgcttcttattataggtcctgtgtctgatgctgatgaatcaccatctcctgattctactacctcacctcctgagattcaagcacctgttcctgtggacgtgcgcaagcccattcctgtgaagcttaagcctgggaaacgtccagcagtggaaaaacttgaggacttgttacagggtggggacggacctttggacttgagtacacggaaacgtccaagacaataagtgttccatatccgtgtttacttaaggtgacgtcaatatttgtgtgacagtgcaatgtaataaaaatatgttaactgttcactggtttttattgctttttgggcggggactcaggtatataagtagaagcagacctgtgtggttagctcataggagctggctttcatccatggaggtttgggccattttggaagaccttaggaagactaggcaactgttagagaacgcttcggacggagtctccggtttttggagattctggttcgctagtgaattagctagggtagtttttaggataaaacaggactataaacaagaatttgaaaagttgttggtagattgcccaggactttttgaagctcttaatttgggccatcaggttcactttaaagaaaaagttttatcagttttagacttttcaaccccaggtagaactgctgctgctgtggcttttcttacttttatattagataaatggatcccgcagactcatttcagcaggggatacgttttggatttcatagccacagcattgtggagaacatggaaggttcgcaagatgaggacaatcttaggttactggccagtgcagcctttgggtgtagcgggaatcctgaggcatccaccggtcatgccagcggttctggaggaggaacagcaagaggacaacccgagagccggcctggaccctccagtggaggaggcggagtagctgacttgtctcctgaactgcaacgggtgcttactggatctacgtccactggacgggataggggcgttaagagggagagggcatctagtggtactgatgctagatctgagttggctttaagtttaatgagtcgcagacgtcctgaaaccatttggtggcatgaggttcagaaagagggaagggatgaagtttctgtattgcaggagaaatattcactggaacaggtgaaaacatgttggttggagcctgaggatgattgggaggtggccattaaaaattatgccaagatagctttgaggcctgataaacagtataagattactagacggattaatatccggaatgcttgttacatatctggaaatggggctgaggtggtaatagatactcaagacaaggcagttattagatgctgcatgatggatatgtggcctggggtagtcggtatggaagcagtaacttttgtaaatgttaagtttaggggagatggttataatggaatagtgtttatggccaataccaaacttatattgcatggttgtagcttttttggtttcaacaatacctgtgtagatgcctggggacaggttagtgtacggggatgtagtttctatgcgtgttggattgccacagctggcagaaccaagagtcaattgtctctgaagaaatgcatatttcaaagatgtaacctgggcattctgaatgaaggcgaagcaagggtccgccactgcgcttctacagatactggatgttttattttgattaagggaaatgccagcgtaaagcataacatgatttgcggtgcttccgatgagaggccttatcaaatgctcacttgtgctggtgggcattgtaatatgctggctactgtgcatattgtttcccatcaacgcaaaaaatggcctgtttttgatcacaatgtgatgacgaagtgtaccatgcatgcaggtgggcgtagaggaatgtttatgccttaccagtgtaacatgaatcatgtgaaagtgttgttggaaccagatgccttttccagaatgagcctaacaggaatttttgacatgaacatgcaaatctggaagatcctgaggtatgatgatacgagatcgagggtacgcgcatgcgaatgcggaggcaagcatgccaggttccagccggtgtgtgtagatgtgactgaagatctcagaccggatcatttggttattgcccgcactggagcagagttcggatccagtggagaagaaactgactaaggtgagtattgggaaaactttggggtgggattttcagatggacagattgagtaaaaatttgttttttctgtcttgcagctgtcatgagtggaaacgcttcttttaaggggggagtcttcagcccttatctgacagggcgtctcccatcctgggcaggagttcgtcagaatgttatgggatctactgtggatggaagacccgtccaacccgccaattcttcaacgctgacctatgctactttaagttcttcacctttggacgcagctgcagctgccgccgccgcttctgttgccgctaacactgtgcttggaatgggttactatggaagcatcatggctaattccacttcctctaataacccttctaccctgactcaggacaagttacttgtccttttggcccagctggaggctttgacccaacgtctgggtgaactttctcagcaggtggtcgagttgcgagtacaaactgagtctgctgtcggcacggcaaagtctaaataaaaaaatcccagaatcaatgaataaataaacaagcttgttgttgatttaaaatcaagtgtttttatttcatttttcgcgcacggtatgccctagaccaccgatctctatcattgagaactcggtggattttttccaggatcctatagaggtgggattgaatgtttagatacatgggcattaggccgtctttggggtggagatagctccattgaagggattcatgctccggggtagtgttgtaaatcacccagtcataacaaggtcgcagtgcatggtgttgcacaatatcttttagaagtaggctgattgccacagataagcccttggtgtaggtgtttacaaaccggttgagctgggatgggtgcattcggggtgaaattatgtgcattttggattggatttttaagttggcaatattgccgccaagatcccgtcttgggttcatgttatgaaggaccaccaagacggtgtatccggtacatttaggaaatttatcgtgcagcttggatggaaaagcgtggaaaaatttggagacacccttgtgtcctccaagattttccatgcactcatccatgataatagcaatggggccgtgggcagcggcgcgggcaaacacgttccgtgggtctgacacatcatagttatgttcctgagttaaatcatcataagccattttaatgaatttggggcggagagtaccagattggggtatgaatgttccttcgggccccggagcatagttcccctcacagatttgcatttcccaagctttcagttccgagggtggaatcatgtccacctggggggctatgaaaaacaccgtttctggggcgggggtgattaattgtgatgatagcaaatttctgagcaattgagatttgccacatccggtggggccataaatgattccgattacgggttgcaggtggtagtttagggaacggcaactgccgtcttctcgaagcaagggggccacctcgttcatcatttcccttacatgcatattttcccgcaccaaatccattaggaggcgctctcctcctagtgatagaagttcttgtagtgaggaaaagtttttcagcggtttcagaccgtcagccatgggcattttggagagagtttgctgcaaaagttctagtctgttccacagttcagtgatgtgttctatggcatctcgatccagcagacctcctcgtttcgcgggtttggacggctcctggaatagggtatgagacgatgggcgtccagcgctgccagggttcggtccttccagggtctcagtgttcgagtcagggttgtttccgtcacagtgaaggggtgtgcgcctgcttgggcgcttgccagggtgcgcttcagactcatcctgctggtcgaaaacttctgtcgcttggcgccctgtatgtcggccaagtagcagtttaccatgagttcgtagttgagcgcctcggctgcgtggcctttggcgcggagcttacctttggaagttttcttgcataccgggcagtataggcatttcagcgcatacaacttgggcgcaaggaaaacggattctggggagtatgcatctgcgccgcaggaggcgcaaacagtttcacattccaccagccaggttaaatccggttcattggggtcaaaaacaagttttccgccatattttttgatgcgtttcttacctttggtctccatgagttcgtgtcctcgttgagtgacaaacaggctgtccgtgtccccgtagactgattttacaggcctcttctccagtggagtgcctcggtcttcttcgtacaggaactctgaccactctgatacaaaggcgcgcgtccaggccagcacaaaggaggctatgtgggaggggtagcgatcgttgtcaaccagggggtccaccttttccaaagtatgcaaacacatgtcaccctcttcaacatccaggaatgtgattggcttgtaggtgtatttcacgtgacctggggtccccgctgggggggtataaaagggggcggttctttgctcttcctcactgtcttccggatcgctgtccaggaacgtcagctgttggggtaggtattccctctcgaaggcgggcatgacctctgcactcaggttgtcagtttctaagaacgaggaggatttgatattgacagtgccggttgagatgcctttcatgaggttttcgtccatctggtcagaaaacacaatttttttattgtcaagtttggtggcaaatgatccatacagggcgttggataaaagtttggcaatggatcgcatggtttggttcttttccttgtccgcgcgctctttggcggcgatgttgagttggacatactcgcgtgccaggcacttccattcggggaagatagttgttaattcatctggcacgattctcacttgccaccctcgattatgcaaggtaattaaatccacactggtggccacctcgcctcgaaggggttcattggtccaacagagcctacctcctttcctagaacagaaagggggaagtgggtctagcataagttcatcgggagggtctgcatccatggtaaagattcccggaagtaaatccttatcaaaatagctgatgggagtggggtcatctaaggccatttgccattctcgagctgccagtgcgcgctcatatgggttaaggggactgccccatggcatgggatgggtgagtgcagaggcatacatgccacagatgtcatagacgtagatgggatcctcaaagatgcctatgtaggttggatagcatcgcccccctctgatacttgctcgcacatagtcatatagttcatgtgatggcgctagcagccccggacccaagttggtgcgattgggtttttctgttctgtagacgatctggcgaaagatggcgtgagaattggaagagatggtgggtctttgaaaaatgttgaaatgggcatgaggtagacctacagagtctctgacaaagtgggcataagattcttgaagcttggttaccagttcggcggtgacaagtacgtctagggcgcagtagtcaagtgtttcttgaatgatgtcataacctggttggtttttcttttcccacagttcgcggttgagaaggtattcttcgcgatccttccagtactcttctagcggaaacccgtctttgtctgcacggtaagatcctagcatgtagaactgattaactgccttgtaagggcagcagcccttctctacgggtagagagtatgcttgagcagcttttcgtagcgaagcgtgagtaagggcaaaggtgtctctgaccatgactttgaggaattggtatttgaagtcgatgtcgtcacaggctccctgttcccagagttggaagtctacccgtttcttgtaggcggggttgggcaaagcgaaagtaacatcattgaagagaatcttgccggccctgggcatgaaattgcgagtgatgcgaaaaggctgtggtacttccgctcggttattgataacctgggcagctaggacgatctcgtcgaaaccgttgatgttgtgtcctacgatgtataattctatgaaacgcggcgtgcctctgacgtgaggtagcttactgagctcatcaaaggttaggtctgtggggtcagataaggcgtagtgttcgagagcccattcgtgcaggtgaggattcgctttaaggaaggaggaccagaggtccactgccagtgctgtttgtaactggtcccggtactgacgaaaatgccgtccgactgccattttttctggggtgacgcaatagaaggtttgggggtcctgccgccagcgatcccacttgagttttatggcgaggtcataggcgatgttgacgagccgctggtctccagagagtttcatgaccagcatgaaggggattagctgcttgccaaaggaccccatccaggtgtaggtttccacatcgtaggtgagaaagagcctttctgtgcgaggatgagagccaatcgggaagaactggatctcctgccaccagttggaggaatggctgttgatgtgatggaagtagaactccctgcgacgcgccgagcattcatgcttgtgcttgtacagacggccgcagtagtcgcagcgttgcacgggttgtatctcgtgaatgagttgtacctggcttcccttgacgagaaatttcagtgggaagccgaggcctggcgattgtatctcgtgctttactatgttgtctgcatcggcctgttcatcttctgtctcgatggtggtcatgctgacgagccctcgcgggaggcaagtccagacctcggcgcggcaggggcggagctcgaggacgagagcgcgcaggctggagctgtccagggtcctgagacgctgcggactcaggttagtaggcagtgtcaggagattaacttgcatgatcttttggagggcgtgcgggaggttcagatagtacttgatctcaacgggtccgttggtggagatgtcgatggcttgcagggttccgtgtcccttgggcgctaccaccgtgcccttgtttttcattttggacggcggtggctctgttgcttcttgcatgtttagaagcggtgtcgagggcgcgcaccgggcggcaggggcggctcgggacccggcggcatggctggcagtggtacgtcggcgccgcgcgcgggtaggttctggtactgcgccctgagaagactcgcatgcgcgacgacgcggcggttgacatcctggatctgacgcctctgggtgaaagctaccggccccgtgagcttgaacctgaaagagagttcaacagaatcaatctcggtatcgttgacggcggcttgcctaaggatttcttgcacgtcaccagagttgtcctggtaggcgatctccgccatgaactgctcgatctcttcctcttgaagatctccgcggcccgctctctcgacggtggccgcgaggtcgttggagatgcgcccaatgagttgagagaatgcattcatgcccgcctcgttccagacgcggctgtagaccacggcccccacgggatctctcgcgcgcatgaccacctgggcgaggttgagctccacgtggcgggtgaagaccgcatagttgcataggcgctggaaaaggtagttgagtgtggtggcgatgtgctcggtgacgaagaaatacatgatccatcgtctcagcggcatctcgctgacatcgcccagagcttccaagcgctccatggcctcgtagaagtccacggcaaaattaaaaaactgggagtttcgcgcggacacggtcaactcctcttccagaagacggataagttcggcgatggtggtgcgcacctcgcgctcgaaagcccctgggatttcttcctcaatctcttcttcttccactaacatctcttcctcttcaggtggggctgcaggaggagggggaacgcggcgacgccggcggcgcacgggcagacggtcgatgaatctttcaatgacctctccgcggcggcggcgcatggtttcagtgacggcgcggccgttctcgcgcggtcgcagagtaaaaacaccgccgcgcatctccttaaagtggtgactgggaggttctccgtttgggagggagagggcgctgattatacattttattaattggcccgtagggactgcacgcagagatctgatcgtgtcaagatccacgggatctgaaaacctttcgacgaaagcgtctaaccagtcacagtcacaaggtaggctgagtacggcttcttgtgggcgggggtggttatgtgttcggtctgggtcttctgtttcttcttcatctcgggaaggtgagacgatgctgctggtgatgaaattaaagtaggcagttctaagacggcggatggtggcgaggagcaccaggtctttgggtccggcttgctggatacgcaggcgattggccattccccaagcattatcctgacatctagcaagatctttgtagtagtcttgcatgagccgttctacgggcacttcttcctcacccgttctgccatgcatacgtgtgagtccaaatccgcgcattggttgtaccagtgccaagtcagctacgactctttcggcgaggatggcttgctgtacttgggtaagggtggcttgaaagtcatcaaaatccacaaagcggtggtaagctcctgtattaatggtgtaagcacagttggccatgactgaccagttaactgtctggtgaccagggcgcacgagctcggtgtatttaaggcgcgaataggcgcgggtgtcaaagatgtaatcgttgcaggtgcgcaccagatactggtaccctataagaaaatgcggcggtggttggcggtagagaggccatcgttctgtagctggagcgccaggggcgaggtcttccaacataaggcggtgatagccgtagatgtacctggacatccaggtgattcctgcggcggtagtagaagcccgaggaaactcgcgtacgcggttccaaatgttgcgtagcggcatgaagtagttcattgtaggcacggtttgaccagtgaggcgcgcgcagtcattgatgctctatagacacggagaaaatgaaagcgttcagcgactcgactccgtagcctggaggaacgtgaacgggttgggtcgcggtgtaccccggttcgagacttgtactcgagccggccggagccgcggctaacgtggtattggcactcccgtctcgacccagcctacaaaaatccaggatacggaatcgagtcgttttgctggtttccgaatggcagggaagtgagtcctattttttttttttgccgctcagatgcatcccgtgctgcgacagatgcgcccccaacaacagcccccctcgcagcagcagcagcagcaatcacaaaaggctgtccctgcaactactgcaactgccgccgtgagcggtgcgggacagcccgcctatgatctggacttggaagagggcgaaggactggcacgtctaggtgcgccttcacccgagcggcatccgcgagttcaactgaaaaaagattctcgcgaggcgtatgtgccccaacagaacctatttagagacagaagcggcgaggagccggaggagatgcgagcttcccgctttaacgcgggtcgtgagctgcgtcacggtttggaccgaagacgagtgttgcgggacgaggatttcgaagttgatgaaatgacagggatcagtcctgccagggcacacgtggctgcagccaaccttgtatcggcttacgagcagacagtaaaggaagagcgtaacttccaaaagtcttttaataatcatgtgcgaaccctgattgcccgcgaagaagttacccttggtttgatgcatttgtgggatttgatggaagctatcattcagaaccctactagcaaacctctgaccgcccagctgtttctggtggtgcaacacagcagagacaatgaggctttcagagaggcgctgctgaacatcaccgaacccgaggggagatggttgtatgatcttatcaacattctacagagtatcatagtgcaggagcggagcctgggcctggccgagaaggtggctgccatcaattactcggttttgagcttgggaaaatattacgctcgcaaaatctacaagactccatacgttcccatagacaaggaggtgaagatagatgggttctacatgcgcatgacgctcaaggtcttgaccctgagcgatgatcttggggtgtatcgcaatgacagaatgcatcgcgcggttagcgccagcaggaggcgcgagttaagcgacagggaactgatgcacagtttgcaaagagctctgactggagctggaaccgagggtgagaattacttcgacatgggagctgacttgcagtggcagcctagtcgcagggctctgagcgccgcgacggcaggatgtgagcttccttacatagaagaggcggatgaaggcgaggaggaagagggcgagtacttggaagactgatggcacaacccgtgttttttgctagatggaacagcaagcaccggatcccgcaatgcgggcggcgctgcagagccagccgtccggcattaactcctcggacgattggacccaggccatgcaacgtatcatggcgttgacgactcgcaaccccgaagcctttagacagcaaccccaggccaaccgtctatcggccatcatggaagctgtagtgccttcccgctctaatcccactcatgagaaggtcctggccatcgtgaacgcgttggtggagaacaaagctattcgtccagatgaggccggactggtatacaacgctctcttagaacgcgtggctcgctacaacagtagcaatgtgcaaaccaatttggaccgtatgataacagatgtacgcgaagccgtgtctcagcgcgaaaggttccagcgtgatgccaacctgggttcgctggtggcgttaaatgctttcttgagtactcagcctgctaatgtgccgcgtggtcaacaggattatactaactttttaagtgctttgagactgatggtatcagaagtacctcagagcgaagtgtatcagtccggtcctgattacttctttcagactagcagacagggcttgcagacggtaaatctgagccaagcttttaaaaaccttaaaggtttgtggggagtgcatgccccggtaggagaaagagcaaccgtgtctagcttgttaactccgaactcccgcctattattactgttggtagctcctttcaccgacagcggtagcatcgaccgtaattcctatttgggttacctactaaacctgtatcgcgaagccatagggcaaagtcaggtggacgagcagacctatcaagaaattacccaagtcagtcgcgctttgggacaggaagacactggcagtttggaagccactctgaacttcttgcttaccaatcggtctcaaaagatccctcctcaatatgctcttactgcggaggaggagaggatccttagatatgtgcagcagagcgtgggattgtttctgatgcaagagggggcaactccgactgcagcactggacatgacagcgcgaaatatggagcccagcatgtatgccagtaaccgacctttcattaacaaactgctggactacttgcacagagctgccgctatgaactctgattatttcaccaatgccatcttaaacccgcactggctgcccccacctggtttctacacgggcgaatatgacatgcccgaccctaatgacggatttctgtgggacgacgtggacagcgatgttttttcacctctttctgatcatcgcacgtggaaaaaggaaggcggcgatagaatgcattcttctgcatcgctgtccggggtcatgggtgctaccgcggctgagcccgagtctgcaagtccttttcctagtctacccttttctctacacagtgtacgtagcagcgaagtgggtagaataagtcgcccgagtttaatgggcgaagaggagtatctaaacgattccttgctcagaccggcaagagaaaaaaatttcccaaacaatggaatagaaagtttggtggataaaatgagtagatggaagacttatgctcaggatcacagagacgagcctgggatcatggggattacaagtagagcgagccgtagacgccagcgccatgacagacagaggggtcttgtgtgggacgatgaggattcggccgatgatagcagcgtgctggacttgggtgggagaggaaggggcaacccgtttgctcatttgcgccctcgcttgggtggtatgttgtaaaaaaaaataaaaaaaaaactcaccaaggccatggcgacgagcgtacgttcgttcttctttattatctgtgtctagtataatgaggcgagtcgtgctaggcggagcggtggtgtatccggagggtcctcctccttcgtacgagagcgtgatgcagcagcagcaggcgacggcggtgatgcaatccccactggaggctccctttgtgcctccgcgatacctggcacctacggagggcagaaacagcattcgttattcggaactggcacctcagtacgataccaccaggttgtatctggtggacaacaagtcggcggacattgcttctctgaactatcagaatgaccacagcaacttcttgaccacggtggtgcaaaacaatgactttacccctacggaagccagcacccagaccattaactttgatgaacgatcgcggtggggcggtcagctaaagaccatcatgcatactaacatgccaaacgtgaacgagtatatgtttagtaacaagttcaaagcgcgtgtgatggtgtccagaaaacctcccgacggtgctgcagttggggatacttatgatcacaagcaggatattttgaaatatgagtggttcgagtttactttgccagaaggcaacttttcagttactatgactattgatttgatgaacaatgccatcatagataattacttgaaagtgggtagacagaatggagtgcttgaaagtgacattggtgttaagttcgacaccaggaacttcaagctgggatgggatcccgaaaccaagttgatcatgcctggagtgtatacgtatgaagccttccatcctgacattgtcttactgcctggctgcggagtggattttaccgagagtcgtttgagcaaccttcttggtatcagaaaaaaacagccatttcaagagggttttaagattttgtatgaagatttagaaggtggtaatattccggccctcttggatgtagatgcctatgagaacagtaagaaagaacaaaaagccaaaatagaagctgctacagctgctgcagaagctaaggcaaacatagttgccagcgactctacaagggttgctaacgctggagaggtcagaggagacaattttgcgccaacacctgttccgactgcagaatcattattggccgatgtgtctgaaggaacggacgtgaaactcactattcaacctgtagaaaaagatagtaagaatagaagctataatgtgttggaagacaaaatcaacacagcctatcgcagttggtatctttcgtacaattatggcgatcccgaaaaaggagtgcgttcctggacattgctcaccacctcagatgtcacctgcggagcagagcaggtctactggtcgcttccagacatgatgaaggatcctgtcactttccgctccactagacaagtcagtaactaccctgtggtgggtgcagagcttatgcccgtcttctcaaagagcttctacaacgaacaagctgtgtactcccagcagctccgccagtccacctcgcttacgcacgtcttcaaccgctttcctgagaaccagattttaatccgtccgccggcgcccaccattaccaccgtcagtgaaaacgttcctgctctcacagatcacgggaccctgccgttgcgcagcagtatccggggagtccaacgtgtgaccgttactgacgccagacgccgcacctgtccctacgtgtacaaggcactgggcatagtcgcaccgcgcgtcctttcaagccgcactttctaaaaaaaaaaaaaatgtccattcttatctcgcccagtaataacaccggttggggtctgcgcgctccaagcaagatgtacggaggcgcacgcaaacgttctacccaacatcctgtccgtgttcgcggacattttcgcgctccatggggcgccctcaagggccgcactcgcgttcgaaccaccgtcgatgatgtaatcgatcaggtggttgccgacgcccgtaattatactcctactgcgcctacatctactgtggatgcagttattgacagtgtagtggctgacgctcgcaactatgctcgacgtaagagccggcgaaggcgcattgccagacgccaccgagctaccactgccatgcgagccgcaagagctctgctacgaagagctagacgcgtggggcgaagagccatgcttagggcggccagacgtgcagcttcgggcgccagcgccggcaggtcccgcaggcaagcagccgctgtcgcagcggcgactattgccgacatggcccaatcgcgaagaggcaatgtatactgggtgcgtgacgctgccaccggtcaacgtgtacccgtgcgcacccgtccccctcgcacttagaagatactgagcagtctccgatgttgtgtcccagcggcgaggatgtccaagcgcaaatacaaggaagaaatgctgcaggttatcgcacctgaagtctacggccaaccgttgaaggatgaaaaaaaaccccgcaaaatcaagcgggttaaaaaggacaaaaaagaagaggaagatggcgatgatgggctggcggagtttgtgcgcgagtttgccccacggcgacgcgtgcaatggcgtgggcgcaaagttcgacatgtgttgagacctggaacttcggtggtctttacacccggcgagcgttcaagcgctacttttaagcgttcctatgatgaggtgtacggggatgatgatattcttgagcaggcggctgaccgattaggcgagtttgcttatggcaagcgtagtagaataacttccaaggatgagacagtgtcgatacccttggatcatggaaatcccacccctagtcttaaaccggtcactttgcagcaagtgttacccgtaactccgcgaacaggtgttaaacgcgaaggtgaagatttgtatcccactatgcaactgatggtacccaaacgccagaagttggaggacgttttggagaaagtaaaagtggatccagatattcaacctgaggttaaagtgagacccattaagcaggtagcgcctggtctgggggtacaaactgtagacattaagattcccactgaaagtatggaagtgcaaactgaacccgcaaagcctactgccacctccactgaagtgcaaacggatccatggatgcccatgcctattacaactgacgccgccggtcccactcgaagatcccgacgaaagtacggtccagcaagtctgttgatgcccaattatgttgtacacccatctattattcctactcctggttaccgaggcactcgctactatcgcagccgaaacagtacctcccgccgtcgccgcaagacacctgcaaatcgcagtcgtcgccgtagacgcacaagcaaaccgactcccggcgccctggtgcggcaagtgtaccgcaatggtagtgcggaacctttgacactgccgcgtgcgcgttaccatccgagtatcatcacttaatcaatgttgccgctgcctccttgcagatatggccctcacttgtcgccttcgcgttcccatcactggttaccgaggaagaaactcgcgccgtagaagagggatgttgggacgcggaatgcgacgctacaggcgacggcgtgctatccgcaagcaattgcggggtggttttttaccagccttaattccaattatcgctgctgcaattggcgcgataccaggcatagcttccgtggcggttcaggcctcgcaacgacattgacattggaaaaaaacgtataaataaaaaaaaaaaaatacaatggactctgacactcctggtcctgtgactatgttttcttagagatggaagacatcaatttttcatccttggctccgcgacacggcacgaagccgtacatgggcacctggagcgacatcggcacgagccaactgaacgggggcgccttcaattggagcagtatctggagcgggcttaaaaattttggctcaaccataaaaacatacgggaacaaagcttggaacagcagtacaggacaggcgcttagaaataaacttaaagaccagaacttccaacaaaaagtagtcgatgggatagcttccggcatcaatggagtggtagatttggctaaccaggctgtgcagaaaaagataaacagtcgtttggacccgccgccagcaaccccaggtgaaatgcaagtggaggaagaaattcctccgccagaaaaacgaggcgacaagcgtccgcgtcccgatttggaagagacgctggtgacgcgcgtagatgaaccgccttcttatgaggaagcaacgaagcttggaatgcccaccactagaccgatagccccaatggccaccggggtgatgaaaccttctcagttgcatcgacccgtcaccttggatttgccccctccccctgctgctactgctgtacccgcttctaagcctgtcgctgccccgaaaccagtcgccgtagccaggtcacgtcccgggggcgctcctcgtccaaatgcgcactggcaaaatactctgaacagcatcgtgggtctaggcgtgcaaagtgtaaaacgccgtcgctgcttttaattaaatatggagtagcgcttaacttgcctatctgtgtatatgtgtcattacacgccgtcacagcagcagaggaaaaaaggaagaggtcgtgcgtcgacgctgagttactttcaagatggccaccccatcgatgctgccccaatgggcatacatgcacatcgccggacaggatgcttcggagtacctgagtccgggtctggtgcagttcgcccgcgccacagacacctacttcaatctgggaaataagtttagaaatcccaccgtagcgccgacccacgatgtgaccaccgaccgtagccagcggctcatgttgcgcttcgtgcccgttgaccgggaggacaatacatactcttacaaagtgcggtacaccctggccgtgggcgacaacagagtgctggatatggccagcacgttctttgacattaggggtgtgttggacagaggtcccagtttcaaaccctattctggtacggcttacaactccctggctcctaaaggcgctccaaatacatctcagtggattgcagaaggtgtaaaaaatacaactggtgaggaacacgtaacagaagaggaaaccaatactactacttacacttttggcaatgctcctgtaaaagctgaagctgaaattacaaaagaaggactcccagtaggtttggaagtttcagatgaagaaagtaaaccgatttatgctgataaaacatatcagccagaacctcagctgggagatgaaacttggactgaccttgatggaaaaaccgaaaagtatggaggcagggctctcaaacccgatactaagatgaaaccatgctacgggtcctttgccaaacctactaatgtgaaaggcggtcaggcaaaacaaaaaacaacggagcagccaaatcagaaagtcgaatatgatatcgacatggagttttttgatgcggcatcgcagaaaacaaacttaagtcctaaaattgtcatgtatgcagaaaatgtaaatttggaaactccagacactcatgtagtgtacaaacctggaacagaagacacaagttccgaagctaatttgggacaacaatctatgcccaacagacccaactacattggcttcagagataactttattggacttatgtactataacagtactggtaacatgggggtgctggctggtcaagcgtctcagttaaatgcagtggttgacttgcaggacagaaacacagaactttcttaccaactcttgcttgactctctgggcgacagaaccagatactttagcatgtggaatcaggctgtggacagttatgatcctgatgtacgtgttattgaaaatcatggtgtggaagatgaacttcccaactactgttttccactggacggcataggtgttccaacaaccagttacaaatcaatagttccaaatggagacaatgcgcctaattggaaggaacctgaagtaaatggaacaagtgagatcggacagggtaatttgtttgccatggaaattaaccttcaagccaatctatggcgaagtttcctttattccaatgtggctctatatctcccagactcgtacaaatacaccccgtccaatgtcactcttccagaaaacaaaaacacctacgactacatgaacgggcgggtggtgccgccatctctagtagacacctatgtgaacattggtgccaggtggtctctggatgccatggacaatgtcaacccattcaaccaccaccgtaacgctggcttgcgttaccgatccatgcttctgggtaacggacgttatgtgcctttccacatacaagtgcctcaaaaattcttcgctgttaaaaacctgctgcttctcccaggctcctacacttatgagtggaactttaggaaggatgtgaacatggttctacagagttccctcggtaacgacctgcgggtagatggcgccagcatcagtttcacgagcatcaacctctatgctacttttttccccatggctcacaacaccgcttccacccttgaagccatgctgcggaatgacaccaatgatcagtcattcaacgactacctatctgcagctaacatgctctaccccattcctgccaatgcaaccaatattcccatttccattccttctcgcaactgggcggctttcagaggctggtcatttaccagactgaaaaccaaagaaactccctctttggggtctggatttgacccctactttgtctattctggttctattccctacctggatggtaccttctacctgaaccacacttttaagaaggtttccatcatgtttgactcttcagtgagctggcctggaaatgacaggttactatctcctaacgaatttgaaataaagcgcactgtggatggcgaaggctacaacgtagcccaatgcaacatgaccaaagactggttcttggtacagatgctcgccaactacaacatcggctatcagggcttctacattccagaaggatacaaagatcgcatgtattcatttttcagaaacttccagcccatgagcaggcaggtggttgatgaggtcaattacaaagacttcaaggccgtcgccataccctaccaacacaacaactctggctttgtgggttacatggctccgaccatgcgccaaggtcaaccctatcccgctaactatccctatccactcattggaacaactgccgtaaatagtgttacgcagaaaaagttcttgtgtgacagaaccatgtggcgcataccgttctcgagcaacttcatgtctatgggggcccttacagacttgggacagaatatgctctatgccaactcagctcatgctctggacatgacctttgaggtggatcccatggatgagcccaccctgctttatcttctcttcgaagttttcgacgtggtcagagtgcatcagccacaccgcggcatcatcgaggcagtctacctgcgtacaccgttctcggccggtaacgctaccacgtaagaagcttcttgcttcttgcaaatagcagctgcaaccatggcctgcggatcccaaaacggctccagcgagcaagagctcagagccattgtccaagacctgggttgcggaccctattttttgggaacctacgataagcgcttcccggggttcatggcccccgataagctcgcctgtgccattgtaaatacggccggacgtgagacggggggagagcactggttggctttcggttggaacccacgttctaacacctgctacctttttgatccttttggattctcggatgatcgtctcaaacagatttaccagtttgaatatgagggtctcctgcgccgcagcgctcttgctaccaaggaccgctgtattacgctggaaaaatctacccagaccgtgcagggtccccgttctgccgcctgcggacttttctgctgcatgttccttcacgcctttgtgcactggcctgaccgtcccatggacggaaaccccaccatgaaattgctaactggagtgccaaacaacatgcttcattctcctaaagtccagcccaccctgtgtgacaatcaaaaagcactctaccattttcttaatacccattcgccttattttcgctcccatcgtacacacatcgaaagggccactgcgttcgaccgtatggatgttcaataatgactcatgtaaacaacgtgttcaataaacatcactttatttttttacatgtatcaaggctctgcattacttatttatttacaagtcgaatgggttctgacgagaatcagaatgacccgcaggcagtgatacgttgcggaactgatacttgggttgccacttgaattcgggaatcaccaacttgggaaccggtatatcgggcaggatgtcactccacagctttctggtcagctgcaaagctccaagcaggtcaggagccgaaatcttgaaatcacaattaggaccagtgctttgagcgcgagagttgcggtacaccggattgcagcactgaaacaccatcagcgacggatgtctcacgcttgccagcacggtgggatctgcaatcatgcccacatccagatcttcagcattggcaatgctgaacggggtcatcttgcaggtctgcctacccatggcgggcacccaattaggcttgtggttgcaatcgcagtgcagggggatcagtatcatcttggcctgatcctgtctgattcctggatacacggctctcatgaaagcatcatattgcttgaaagcctgctgggctttactaccctcggtataaaacatcccgcaggacctgctcgaaaactggttagctgcacagccggcatcattcacacagcagcgggcgtcattgttagctatttgcaccacacttctgccccagcggttttgggtgattttggttcgctcgggattctcctttaaggctcgttgtccgttctcgctggccacatccatctcgataatctgctccttctgaatcataatattgccatgcaggcacttcagcttgccctcataatcattgcagccatgaggccacaacgcacagcctgtacattcccaattatggtgggcgatctgagaaaaagaatgtatcattccctgcagaaatcttcccatcatcgtgctcagtgtcttgtgactagtgaaagttaactggatgcctcggtgctcctcgtttacgtactggtgacagatgcgcttgtattgttcgtgttgctcaggcattagtttaaaagaggttctaagttcgttatccagcctgtacttctccatcagcagacacatcacttccatgcctttctcccaagcagacaccaggggcaagctaatcggattcttaacagtgcaggcagcagctcctttagccagagggtcatctttagcgatcttctcaatgcttcttttgccatccttctcaacgatgcgcacgggcgggtagctgaaacccactgctacaagttgcgcctcttctctttcttcttcgctgtcttgactgatgtcttgcatggggatatgtttggtcttccttggcttctttttggggggtatcggaggaggaggactgtcgctccgttccggagacagggaggattgtgacgtttcgctcaccattaccaactgactgtcggtagaagaacctgaccccacacggcgacaggtgtttctcttcgggggcagaggtggaggcgattgcgaagggctgcggtccgacctggaaggcggatgactggcagaaccccttccgcgttcgggggtgtgctccctgtggcggtcgcttaactgatttccttcgcggctggccattgtgttctcctaggcagagaaacaacagacatggaaactcagccattgctgtcaacatcgccacgagtgccatcacatctcgtcctcagcgacgaggaaaaggagcagagcttaagcattccaccgcccagtcctgccaccacctctaccctagaagataaggaggtcgacgcatctcatgacatgcagaataaaaaagcgaaagagtctgagacagacatcgagcaagacccgggctatgtgacaccggtggaacacgaggaagagttgaaacgctttctagagagagaggatgaaaactgcccaaaacaacgagcagataactatcaccaagatgctggaaatagggatcagaacaccgactacctcatagggcttgacggggaagacgcgctccttaaacatctagcaagacagtcgctcatagtcaaggatgcattattggacagaactgaagtgcccatcagtgtggaagagctcagccgcgcctacgagcttaacctcttttcacctcgtactccccccaaacgtcagccaaacggcacctgcgagccaaatcctcgcttaaacttttatccagcttttgctgtgccagaagtactggctacctatcacatcttttttaaaaatcaaaaaattccagtctcctgccgcgctaatcgcacccgcgccgatgccctactcaatctgggacctggttcacgcttacctgatatagcttccttggaagaggttccaaagatcttcgagggtctgggcaataatgagactcgggccgcaaatgctctgcaaaagggagaaaatggcatggatgagcatcacagcgttctggtggaattggaaggcgataatgccagactcgcagtactcaagcgaagcatcgaggtcacacacttcgcatatcccgctgtcaacctgccccctaaagtcatgacggcggtcatggaccagttactcattaagcgcgcaagtcccctttcagaagacatgcatgacccagatgcctgtgatgagggtaaaccagtggtcagtgatgagcagctaacccgatggctgggcaccgactctcccagggatttggaagagcgtcgcaagcttatgatggccgtggtgctggttaccgtagaactagagtgtctccgacgtttctttaccgattcagaaaccttgcgcaaactcgaagagaatctgcactacacttttagacacggctttgtgcggcaggcatgcaagatatctaacgtggaactcaccaacctggtttcctacatgggtattctgcatgagaatcgcctaggacaaagcgtgctgcacagcaccctgaagggggaagcccgccgtgattacatccgcgattgtgtctatctgtacctgtgccacacgtggcaaaccggcatgggtgtatggcagcaatgtttagaagaacagaacttgaaagagcttgacaagctcttacagaaatctcttaaggttctgtggacagggttcgacgagcgcaccgtcgcttccgacctggcagacctcatcttcccagagcgtctcagggttactttgcgaaacggattgcctgactttatgagccagagcatgcttaacaattttcgctctttcatcctggaacgctccggtatcctgcccgccacctgctgcgcactgccctccgactttgtgcctctcacctaccgcgagtgccccccgccgctatggagtcactgctacctgttccgtctggccaactatctctcctaccactcggatgtgatcgaggatgtgagcggagacggcttgctggagtgtcactgccgctgcaatctgtgcacgccccaccggtccctagcttgcaacccccagttgatgagcgaaacccagataataggcacctttgaattgcaaggccccagcagccaaggcgatgggtcttctcctgggcaaagtttaaaactgaccccgggactgtggacctccgcctacttgcgcaagtttgctccggaagattaccacccctatgaaatcaagttctatgaggaccaatcacagcctccaaaggccgaactttcggcctgcgtcatcacccagggggcaattctggcccaattgcaagccatccaaaaatcccgccaagaatttctactgaaaaagggtaagggggtctaccttgacccccagaccggcgaggaactcaacacaaggttccctcaggatgtcccaacgacgagaaaacaagaagttgaaggtgcagccgccgcccccagaagatatggaggaagattgggacagtcaggcagaggaggcggaggaggacagtctggaggacagtctggaggaagacagtttggaggaggaaaacgaggaggcagaggaggtggaagaagtaaccgccgacaaacagttatcctcggctgcggagacaagcaacagcgctaccatctccgctccgagtcgaggaacccggcggcgtcccagcagtagatgggacgagaccggacgcttcccgaacccaaccagcgcttccaagaccggtaagaaggatcggcagggatacaagtcctggcgggggcataagaatgccatcatctcctgcttgcatgagtgcgggggcaacatatccttcacgcggcgctacttgctattccaccatggggtgaactttccgcgcaatgttttgcattactaccgtcacctccacagcccctactatagccagcaaatcccggcagtctcgacagataaagacagcggcggcgacctccaacagaaaaccagcagcggcagttagaaaatacacaacaagtgcagcaacaggaggattaaagattacagccaacgagccagcgcaaacccgagagttaagaaatcggatctttccaaccctgtatgccatcttccagcagagtcggggtcaagagcaggaactgaaaataaaaaaccgatctctgcgttcgctcaccagaagttgtttgtatcacaagagcgaagatcaacttcagcgcactctcgaggacgccgaggctctcttcaacaagtactgcgcgctgactcttaaagagtaggcagcgaccgcgcttattcaaaaaaggcgggaattacatcatcctcgacatgagtaaagaaattcccacgccttacatgtggagttatcaaccccaaatgggattggcggcaggcgcctcccaggactactccacccgcatgaattggctcagcgccgggccttctatgatttctcgagttaatgatatacgcgcctaccgaaaccaaatacttttggaacagtcagctcttaccaccacgccccgccaacaccttaatcccagaaattggcccgccgccctagtgtaccaggaaagtcccgctcccaccactgtattacttcctcgagacgcccaggccgaagtccaaatgactaatgcaggtgcgcagttagctggcggctccaccctatgtcgtcacaggcctcggcataatataaaacgcctgatgatcagaggccgaggtatccagctcaacgacgagtcggtgagctctccgcttggtctacgaccagacggaatctttcagattgccggctgcgggagatcttccttcacccctcgtcaggctgttctgactttggaaagttcgtcttcgcaaccccgctcgggcggaatcgggaccgttcaatttgtggaggagtttactccctctgtctacttcaaccccttctccggatctcctgggcattacccggacgagttcataccgaacttcgacgcgattagcgagtcagtggacggctacgattgatgtctggtgacgcggctgagctatctcggctgcgacatctagaccactgccgccgctttcgctgctttgcccgggaactcattgagttcatctacttcgaactccccaaggatcaccctcaaggtccggcccacggagtgcggatttctatcgaaggcaaaatagactctcgcctgcaacgaattttctcccagcggcccgtgctgatcgagcgagaccagggaaacaccacggtttccatctactgcatttgtaatcaccccggattgcatgaaagcctttgctgtcttatgtgtactgagtttaataaaaactgaattaagactctcctacggactgccgcttcttcaacccggattttacaaccagaagaacgaaacttttcctgtcgtccaggactctgttaacttcacctttcctactcacaaactagaagctcaacgactacaccgcttttccagaagcattttccctactaatactactttcaaaaccggaggtgagctccaaggtcttcctacagaaaacccttgggtggaagcgggccttgtagtgctaggaattcttgcgggtgggcttgtgattattctttgctacctatacacaccttgcttcactttcttagtggtgttgtggtattggtttaaaaaatggggcccatactagtcttgcttgttttactttcgcttttggaaccgggttctgccaattacgatccatgtctagacttcgacccagaaaactgcacacttacttttgcacccgacacaagccgcatctgtggagttcatcgcctctcttacgaacttggcccccaacgacaaaaatttacctgcatggtgggaatcaaccccatagttatcacccagcaaagtggagatactaagggttgcattcactgctcctgcgattccatcgagtgcacctacaccctgctgaagaccctatgcggcctaagagacctgctaccaatgaattaaaaaatgattaataaaaaatcacttacttgaaatcagcaataaggtctctgttgaaattttctcccagcagcacctcacttccctcttcccaactctggtattctaaaccccgttcagcggcatactttctccatactttaaaggggatgtcaaattttagctcctctcctgtacccacaatcttcatgtctttcttcccagatgaccaagagagtccggctcagtgactccttcaaccctgtctacccctatgaagatgaaagcacctcccaacacccctttataaacccagggtttatttccccaaatggcttcacacaaagcccaaacggagttcttactttaaaatgtttaaccccactaacaaccacaggcggatctctacagctaaaagtgggagggggacttacagtggatgacaccaacggttttttgaaagaaaacataagtgccaccacaccactcgttaagactggtcactctataggtttaccactaggagccggattgggaacgaatgaaaataaactttgtatcaaattaggacaaggacttacattcaattcaaacaacatttgcattgatgacaatattaacaccttatggacaggagtcaaccccaccgaagccaactgtcaaatcatgaactccagtgaatctaatgattgcaaattaattctaacactagttaaaactggagcactagtcactgcatttgtttatgttataggagtatctaacaattttaatatgctaactacacacagaaatataaattttactgcagagctgtttttcgattctactggtaatttactaactagactctcatccctcaaaactccacttaatcataaatcaggacaaaacatggctactggtgccattactaatgctaaaggtttcatgcccagcacgactgcctatcctttcaatgataattctagagaaaaagaaaactacatttacggaacttgttactacacagctagtgatcgcactgcttttcccattgacatatctgtcatgcttaaccgaagagcaataaatgacgagacatcatattgtattcgtataacttggtcctggaacacaggagatgccccagaggtgcaaacctctgctacaaccctagtcacctccccatttaccttttactacatcagagaagacgactgacaaataaagtttgcgatcgccaggcccaccatgtgtcaccagcagttggtcatctcttggttttccctggtttttctggcatctcccctcgtggccatatgggaactgaagaaagatgtttatgtcgtagaattggattggtatccggatgcccctggagaaatggtggtcctcacctgtgacacccctgaagaagatggtatcacctggaccttggaccagagcagtgaggtcttaggctctggcaaaaccctgaccatccaagtcaaagagtttggagatgctggccagtacacctgtcacaaaggaggcgaggttctaagccattcgctcctgctgcttcacaaaaaggaagatggaatttggtccactgatattttaaaggaccagaaagaacccaaaaataagacctttctaagatgcgaggccaagaattattctggacgtttcacctgctggtggctgacgacaatcagtactgatttgacattcagtgtcaaaagcagcagaggctcttctgacccccaaggggtgacgtgcggagctgctacactctctgcagagagagtcagaggggacaacaaggagtatgagtactcagtggagtgccaggaggacagtgcctgcccagctgctgaggagagtctgcccattgaggtcatggtggatgccgttcacaagctcaagtatgaaaactacaccagcagcttcttcatcagggacatcatcaaacctgacccacccaagaacttgcagctgaagccattaaagaattctcggcaggtggaggtcagctgggagtaccctgacacctggagtactccacattcctacttctccctgacattctgcgttcaggtccagggcaagagcaagagagaaaagaaagatagagtcttcacggacaagacctcagccacggtcatctgccgcaaaaatgccagcattagcgtgcgggcccaggaccgctactatagctcatcttggagcgaatgggcatctgtgccctgcagtggagggggcggcagcgggggaggcggcagcggcggcgggggatcgagaaacctccccgtggccactccagacccaggaatgttcccatgccttcaccactcccaaaacctgctgagggccgtcagcaacatgctccagaaggccagacaaactctagaattttacccttgcacttctgaagagattgatcatgaagatatcacaaaagataaaaccagcacagtggaggcctgtttaccattggaattaaccaagaatgagagttgcctaaattccagagagacctctttcataactaatgggagttgcctggcctccagaaagacctcttttatgatggccctgtgccttagtagtatttatgaagacttgaagatgtaccaggtggagttcaagaccatgaatgcaaagcttctgatggatcctaagaggcagatctttctagatcaaaacatgctggcagttattgatgagctgatgcaggccctgaatttcaacagtgagactgtgccacaaaaatcctcccttgaagaaccggatttttataaaactaaaatcaagctctgcatacttcttcatgctttcagaattcgggcagtgactattgatagagtgatgagctatctgaatgcttccggaagcggagctactaacttcagcctgctgaagcaggctggagacgtggaggagaaccctggacctgactggacctggcgcatcctgttcttggtggcagctgctacgggagctcattccaactgggtgaatgtaataagtgatttgaaaaaaattgaagatcttattcaatctatgcatattgatgctactttatatacggaaagtgatgttcaccccagttgcaaagtaacagcaatgaagtgctttctcttggagttacaagttatttcacttgagtccggagatgcaagtattcatgatacagtagaaaatctgatcatcctagcaaacaacagtttgtcttctaatgggaatgtaacagaatctggatgcaaagaatgtgaggaactggaggaaaaaaatattaaagaatttttgcagagttttgtacatattgtccaaatgttcatcaacacttctggaagcggagagggcagaggaagtctgctaacatgcggtgacgtcgaggagaatcctggacctaagaaaagtggtgttcttttcctcttgggcatcatcttgctggttctgattggagtgcaaggaaccccagtagtgagaaagggtcgctgttcctgcatcagcaccaaccaagggactatccacctacaatccttgaaagaccttaaacaatttgccccaagcccttcctgcgagaaaattgaaatcattgctacactgaagaatggagttcaaacatgtctaaacccagattcagcagatgtgaaggaactgattaaaaagtgggagaaacaggtcagccaaaagaaaaagcaaaagaatgggaaaaaacatcaaaaaaagaaagttctgaaagttcgaaaatctcaacgttctcgtcaaaagaagactacaggaagcggacagtgtactaattatgctctcttgaaattggctggagatgttgagagcaaccctggacctgctcagtcactggctctgagcctccttatcctggttctggcctttggcatccccaggacccaaggcagtgatggaggggctcaggactgttgcctcaagtacagccaaaggaagattcccgccaaggttgtccgcagctaccggaagcaggaaccaagcttaggctgctccatcccagctatcctgttcttgccccgcaagcgctctcaggcagagctatgtgcagacccaaaggagctctgggtgcagcagctgatgcagcatctggacaagacaccatccccacagaaaccagcccagggcggaagcggagtgaaacagactttgaattttgaccttctcaagttggcgggagacgtggagtccaaccctggacctgccttgacctttgctttactggtggccctcctggtgctcagctgcaagtcaagctgctctgtgggctgtgatctgcctcaaacccacagcctgggtagcaggaggaccttgatgctcctggcacagatgaggagaatctctcttttctcctgcttgaaggacagacatgactttggatttccccaggaggagtttggcaaccagttccaaaaggctgaaaccatccctgtcctccatgagatgatccagcagatcttcaatctcttcagcacaaaggactcatctgctgcttgggatgagaccctcctagacaaattctacactgaactctaccagcagctgaatgacctggaagcctgtgtgatacagggggtgggggtgacagagactcccctgatgaaggaggactccattctggctgtgaggaaatacttccaaagaatcactctctatctgaaagagaagaaatacagcccttgtgcctgggaggttgtcagagcagaaatcatgagatctttttctttgtcaacaaacttgcaagaaagtttaagaagtaaggaataagctagcttgactgactgagatacagcgtaccttcagctcacagacatgataagatacattgatgagtttggacaaaccacaactagaatgcagtgaaaaaaatgctttatttgtgaaatttgtgatgctattgctttatttgtaaccattataagctgcaataaacaagttaacaacaacaattgcattcattttatgtttcaggttcagggggaggtgtgggaggttttttaaagcaagtaaaacctctacaaatgtggtagtcgtcagctatcctgcaggaacttgtttatttgaaaatcaattcacaaaatccgagtagttattttgcctcccccttcccatttaacagaatacaccaatctctccccacgcacagctttaaacatttggataccattagatatagacatggttttagattccacattccaaacagtttcagagcgagccaatctggggtcagtgatagataaaaatccatcgggatagtcttttaaagcgctttcacagtccaactgctgcggatgcgactccggagtctggatcacggtcatctggaagaagaacgatgggaatcataatccgaaaacggtatcggacgattgtgtctcatcaaacccacaagcagccgctgtctgcgtcgctccgtgcgactgctgtttatgggatcagggtccacagtgtcctgaagcatgattttaatagcccttaacatcaactttctggtgcgatgcgcgcagcaacgcattctgatttcactcaaatctttgcagtaggtacaacacattattacaatattgtttaataaaccataattaaaagcgctccagccaaaactcatatctgatataatcgcccctgcatgaccatcataccaaagtttaatataaattaaatgacgttccctcaaaaacacactacccacatacatgatctcttttggcatgtgcatattaacaatctgtctgtaccatggacaacgttggttaatcatgcaacccaatataaccttccggaaccacactgccaacaccgctcccccagccatgcattgaagtgaaccctgctgattacaatgacaatgaagaacccaattctctcgaccgtgaatcacttgagaatgaaaaatatctatagtggcacaacatagacataaatgcatgcatcttctcataatttttaactcctcaggatttagaaacatatcccagggaataggaagctcttgcagaacagtaaagctggcagaacaaggaagaccacgaacacaacttacactatgcatagtcatagtatcacaatctggcaacagcgggtggtcttcagtcatagaagctcgggtttcattttcctcacaacgtggtaactgggctctggtgtaagggtgatgtctggcgcatgatgtcgagcgtgcgcgcaaccttgtcataatggagttgcttcctgacattctcgtattttgtatagcaaaacgcggccctggcagaacacactcttcttcgccttctatcctgccgcttagcgtgttccgtgtgatagttcaagtacaaccacactcttaagttggtcaaaagaatgctggcttcagttgtaatcaaaactccatcgcatctaatcgttctgaggaaatcatccaagcaatgcaactggattgtgtttcaagcaggagaggagagggaagagacggaagaaccatgttaatttttattccaaacgatctcgcagtacttcaaattgtagatcgcgcagatggcatctctcgcccccactgtgttggtgaaaaagcacagctagatcaaaagaaatgcgattttcaaggtgctcaacggtggcttccagcaaagcctccacgcgcacatccaagaacaaaagaataccaaaagaaggagcattttctaactcctcaatcatcatattacattcctgcaccattcccagataattttcagctttccagccttgaattattcgtgtcagttcttgtggtaaatccaatccacacattacaaacaggtcccggagggcgccctccaccaccattcttaaacacaccctcataatgacaaaatatcttgctcctgtgtcacctgtagcgaattgagaatggcaacatcaattgacatgcccttggctctaagttcttctttaagttctagttgtaaaaactctctcatattatcaccaaactgcttagccagaagccccccgggaacaagagcaggggacgctacagtgcagtacaagcgcagacctccccaattggctccagcaaaaacaagattggaataagcatattgggaaccgccagtaatatcatcgaagttgctggaaatataatcaggcagagtttcttgtaaaaattgaataaaagaaaaatttgccaaaaaaacattcaaaacctctgggatgcaaatgcaataggttaccgcgctgcgctccaacattgttagttttgaattagtctgcaaaaataaaaaaaaaaacaagcgtcatatcatagtagcctgacgaacagatggataaatcagtctttccatcacaagacaagccacagggtctccagctcgaccctcgtaaaacctgtcatcatgattaaacaacagcaccgaaagttcctcgcggtgaccagcatgaataattcttgatgaagcatacaatccagacatgttagcatcagttaacgagaaaaaacagccaacatagcctttgggtataattatgcttaatcgtaagtatagcaaagccacccctcgcggatacaaagtaaaaggcacaggagaataaaaaatataattatttctctgctgctgttcaggcaacgtcgcccccggtccctctaaatacacatacaaagcctcatcagccatggcttaccagacaaagtacagcgggcacacaaagcacaagctctaaagtgactctccaacctctccacaatatatatatacacaagccctaaactgacgtaatgggagtaaagtgtaaaaaatcccgccaaacccaacacacaccccgaaactgcgtcaccagggaaaagtacagtttcacttccgcaatcccaacaggcgtaacttcctctttctcacggtacgtgatatcccactaacttgcaacgtcattttcccacggtcgcaccgccccttttagccgttaaccccacagccaatcaccacacgatccacactttttaaaatcacctcatttacatattggcaccattccatctataaggtatattatatagataga

SEQ ID NO: 84 - DNA, 36250 bp, Artificial Sequence
  Genome sequence of NG-722 virus
tctatctatataatataccttatagatggaatggtgccaatatgtaaatgaggtgattttaaaaagtgtggatcgtgtggtgattggctgtggggttaacggctaaaaggggcggtgcgaccgtgggaaaatgacgttttgtgggggtggagtttttttgcaagttgtcgcgggaaatgtgacgcataaaaaggcttttttctcacggaactacttagttttcccacggtatttaacaggaaatgaggtagttttgaccggatgcaagtgaaaattgttgattttcgcgcgaaaactgaatgaggaagtgtttttctgaataatgtggtatttatggcagggtggagtatttgttcagggccaggtagactttgacccattacgtggaggtttcgattaccgtgttttttacctgaatttccgcgtaccgtgtcaaagtcttctgtttttacgtaggtgtcagctgatcgctagggtatttatacctcagggtttgtgtcaagaggccactcttgagtgccagcgagaagagttttctcctctgcgccggcagtttaataataaaaaaatgagagatttgcgatttctgcctcaggaaataatctctgctgagactggaaatgaaatattggagcttgtggtgcacgccctgatgggagacgatccggagccacctgtgcagctttttgagcctcctacgcttcaggaactgtatgatttagaggtagagggatcggaggattctaatgaggaagctgtaaatggcttttttaccgattctatgcttttagctgctaatgaagggttagaattagatccgcctttggacacttttgatactccaggggtaattgtggaaagcggtacaggtgtaagaaaattacctgatttgagttccgtggactgtgatttgcactgctatgaagacgggtttcctccgagtgatgaggaggaccatgaaaaggagcagtccatgcagactgcagcgggtgagggagtgaaggctgccaatgttggttttcagttggattgcccggagcttcctggacatggctgtaagtcttgtgaatttcacaggaaaaatactggagtaaaggaactgttatgttcgctttgttatatgagaacgcactgccactttatttacagtaagtgtgtttaagttaaaatttaaaggaatatgctgtttttcacatgtatattgagtgtgagttttgtgcttcttattataggtcctgtgtctgatgctgatgaatcaccatctcctgattctactacctcacctcctgagattcaagcacctgttcctgtggacgtgcgcaagcccattcctgtgaagcttaagcctgggaaacgtccagcagtggaaaaacttgaggacttgttacagggtggggacggacctttggacttgagtacacggaaacgtccaagacaataagtgttccatatccgtgtttacttaaggtgacgtcaatatttgtgtgacagtgcaatgtaataaaaatatgttaactgttcactggtttttattgctttttgggcggggactcaggtatataagtagaagcagacctgtgtggttagctcataggagctggctttcatccatggaggtttgggccattttggaagaccttaggaagactaggcaactgttagagaacgcttcggacggagtctccggtttttggagattctggttcgctagtgaattagctagggtagtttttaggataaaacaggactataaacaagaatttgaaaagttgttggtagattgcccaggactttttgaagctcttaatttgggccatcaggttcactttaaagaaaaagttttatcagttttagacttttcaaccccaggtagaactgctgctgctgtggcttttcttacttttatattagataaatggatcccgcagactcatttcagcaggggatacgttttggatttcatagccacagcattgtggagaacatggaaggttcgcaagatgaggacaatcttaggttactggccagtgcagcctttgggtgtagcgggaatcctgaggcatccaccggtcatgccagcggttctggaggaggaacagcaagaggacaacccgagagccggcctggaccctccagtggaggaggcggagtagctgacttgtctcctgaactgcaacgggtgcttactggatctacgtccactggacgggataggggcgttaagagggagagggcatctagtggtactgatgctagatctgagttggctttaagtttaatgagtcgcagacgtcctgaaaccatttggtggcatgaggttcagaaagagggaagggatgaagtttctgtattgcaggagaaatattcactggaacaggtgaaaacatgttggttggagcctgaggatgattgggaggtggccattaaaaattatgccaagatagctttgaggcctgataaacagtataagattactagacggattaatatccggaatgcttgttacatatctggaaatggggctgaggtggtaatagatactcaagacaaggcagttattagatgctgcatgatggatatgtggcctggggtagtcggtatggaagcagtaacttttgtaaatgttaagtttaggggagatggttataatggaatagtgtttatggccaataccaaacttatattgcatggttgtagcttttttggtttcaacaatacctgtgtagatgcctggggacaggttagtgtacggggatgtagtttctatgcgtgttggattgccacagctggcagaaccaagagtcaattgtctctgaagaaatgcatatttcaaagatgtaacctgggcattctgaatgaaggcgaagcaagggtccgccactgcgcttctacagatactggatgttttattttgattaagggaaatgccagcgtaaagcataacatgatttgcggtgcttccgatgagaggccttatcaaatgctcacttgtgctggtgggcattgtaatatgctggctactgtgcatattgtttcccatcaacgcaaaaaatggcctgtttttgatcacaatgtgatgacgaagtgtaccatgcatgcaggtgggcgtagaggaatgtttatgccttaccagtgtaacatgaatcatgtgaaagtgttgttggaaccagatgccttttccagaatgagcctaacaggaatttttgacatgaacatgcaaatctggaagatcctgaggtatgatgatacgagatcgagggtacgcgcatgcgaatgcggaggcaagcatgccaggttccagccggtgtgtgtagatgtgactgaagatctcagaccggatcatttggttattgcccgcactggagcagagttcggatccagtggagaagaaactgactaaggtgagtattgggaaaactttggggtgggattttcagatggacagattgagtaaaaatttgttttttctgtcttgcagctgtcatgagtggaaacgcttcttttaaggggggagtcttcagcccttatctgacagggcgtctcccatcctgggcaggagttcgtcagaatgttatgggatctactgtggatggaagacccgtccaacccgccaattcttcaacgctgacctatgctactttaagttcttcacctttggacgcagctgcagctgccgccgccgcttctgttgccgctaacactgtgcttggaatgggttactatggaagcatcatggctaattccacttcctctaataacccttctaccctgactcaggacaagttacttgtccttttggcccagctggaggctttgacccaacgtctgggtgaactttctcagcaggtggtcgagttgcgagtacaaactgagtctgctgtcggcacggcaaagtctaaataaaaaaatcccagaatcaatgaataaataaacaagcttgttgttgatttaaaatcaagtgtttttatttcatttttcgcgcacggtatgccctagaccaccgatctctatcattgagaactcggtggattttttccaggatcctatagaggtgggattgaatgtttagatacatgggcattaggccgtctttggggtggagatagctccattgaagggattcatgctccggggtagtgttgtaaatcacccagtcataacaaggtcgcagtgcatggtgttgcacaatatcttttagaagtaggctgattgccacagataagcccttggtgtaggtgtttacaaaccggttgagctgggatgggtgcattcggggtgaaattatgtgcattttggattggatttttaagttggcaatattgccgccaagatcccgtcttgggttcatgttatgaaggaccaccaagacggtgtatccggtacatttaggaaatttatcgtgcagcttggatggaaaagcgtggaaaaatttggagacacccttgtgtcctccaagattttccatgcactcatccatgataatagcaatggggccgtgggcagcggcgcgggcaaacacgttccgtgggtctgacacatcatagttatgttcctgagttaaatcatcataagccattttaatgaatttggggcggagagtaccagattggggtatgaatgttccttcgggccccggagcatagttcccctcacagatttgcatttcccaagctttcagttccgagggtggaatcatgtccacctggggggctatgaaaaacaccgtttctggggcgggggtgattaattgtgatgatagcaaatttctgagcaattgagatttgccacatccggtggggccataaatgattccgattacgggttgcaggtggtagtttagggaacggcaactgccgtcttctcgaagcaagggggccacctcgttcatcatttcccttacatgcatattttcccgcaccaaatccattaggaggcgctctcctcctagtgatagaagttcttgtagtgaggaaaagtttttcagcggtttcagaccgtcagccatgggcattttggagagagtttgctgcaaaagttctagtctgttccacagttcagtgatgtgttctatggcatctcgatccagcagacctcctcgtttcgcgggtttggacggctcctggaatagggtatgagacgatgggcgtccagcgctgccagggttcggtccttccagggtctcagtgttcgagtcagggttgtttccgtcacagtgaaggggtgtgcgcctgcttgggcgcttgccagggtgcgcttcagactcatcctgctggtcgaaaacttctgtcgcttggcgccctgtatgtcggccaagtagcagtttaccatgagttcgtagttgagcgcctcggctgcgtggcctttggcgcggagcttacctttggaagttttcttgcataccgggcagtataggcatttcagcgcatacaacttgggcgcaaggaaaacggattctggggagtatgcatctgcgccgcaggaggcgcaaacagtttcacattccaccagccaggttaaatccggttcattggggtcaaaaacaagttttccgccatattttttgatgcgtttcttacctttggtctccatgagttcgtgtcctcgttgagtgacaaacaggctgtccgtgtccccgtagactgattttacaggcctcttctccagtggagtgcctcggtcttcttcgtacaggaactctgaccactctgatacaaaggcgcgcgtccaggccagcacaaaggaggctatgtgggaggggtagcgatcgttgtcaaccagggggtccaccttttccaaagtatgcaaacacatgtcaccctcttcaacatccaggaatgtgattggcttgtaggtgtatttcacgtgacctggggtccccgctgggggggtataaaagggggcggttctttgctcttcctcactgtcttccggatcgctgtccaggaacgtcagctgttggggtaggtattccctctcgaaggcgggcatgacctctgcactcaggttgtcagtttctaagaacgaggaggatttgatattgacagtgccggttgagatgcctttcatgaggttttcgtccatctggtcagaaaacacaatttttttattgtcaagtttggtggcaaatgatccatacagggcgttggataaaagtttggcaatggatcgcatggtttggttcttttccttgtccgcgcgctctttggcggcgatgttgagttggacatactcgcgtgccaggcacttccattcggggaagatagttgttaattcatctggcacgattctcacttgccaccctcgattatgcaaggtaattaaatccacactggtggccacctcgcctcgaaggggttcattggtccaacagagcctacctcctttcctagaacagaaagggggaagtgggtctagcataagttcatcgggagggtctgcatccatggtaaagattcccggaagtaaatccttatcaaaatagctgatgggagtggggtcatctaaggccatttgccattctcgagctgccagtgcgcgctcatatgggttaaggggactgccccatggcatgggatgggtgagtgcagaggcatacatgccacagatgtcatagacgtagatgggatcctcaaagatgcctatgtaggttggatagcatcgcccccctctgatacttgctcgcacatagtcatatagttcatgtgatggcgctagcagccccggacccaagttggtgcgattgggtttttctgttctgtagacgatctggcgaaagatggcgtgagaattggaagagatggtgggtctttgaaaaatgttgaaatgggcatgaggtagacctacagagtctctgacaaagtgggcataagattcttgaagcttggttaccagttcggcggtgacaagtacgtctagggcgcagtagtcaagtgtttcttgaatgatgtcataacctggttggtttttcttttcccacagttcgcggttgagaaggtattcttcgcgatccttccagtactcttctagcggaaacccgtctttgtctgcacggtaagatcctagcatgtagaactgattaactgccttgtaagggcagcagcccttctctacgggtagagagtatgcttgagcagcttttcgtagcgaagcgtgagtaagggcaaaggtgtctctgaccatgactttgaggaattggtatttgaagtcgatgtcgtcacaggctccctgttcccagagttggaagtctacccgtttcttgtaggcggggttgggcaaagcgaaagtaacatcattgaagagaatcttgccggccctgggcatgaaattgcgagtgatgcgaaaaggctgtggtacttccgctcggttattgataacctgggcagctaggacgatctcgtcgaaaccgttgatgttgtgtcctacgatgtataattctatgaaacgcggcgtgcctctgacgtgaggtagcttactgagctcatcaaaggttaggtctgtggggtcagataaggcgtagtgttcgagagcccattcgtgcaggtgaggattcgctttaaggaaggaggaccagaggtccactgccagtgctgtttgtaactggtcccggtactgacgaaaatgccgtccgactgccattttttctggggtgacgcaatagaaggtttgggggtcctgccgccagcgatcccacttgagttttatggcgaggtcataggcgatgttgacgagccgctggtctccagagagtttcatgaccagcatgaaggggattagctgcttgccaaaggaccccatccaggtgtaggtttccacatcgtaggtgagaaagagcctttctgtgcgaggatgagagccaatcgggaagaactggatctcctgccaccagttggaggaatggctgttgatgtgatggaagtagaactccctgcgacgcgccgagcattcatgcttgtgcttgtacagacggccgcagtagtcgcagcgttgcacgggttgtatctcgtgaatgagttgtacctggcttcccttgacgagaaatttcagtgggaagccgaggcctggcgattgtatctcgtgctttactatgttgtctgcatcggcctgttcatcttctgtctcgatggtggtcatgctgacgagccctcgcgggaggcaagtccagacctcggcgcggcaggggcggagctcgaggacgagagcgcgcaggctggagctgtccagggtcctgagacgctgcggactcaggttagtaggcagtgtcaggagattaacttgcatgatcttttggagggcgtgcgggaggttcagatagtacttgatctcaacgggtccgttggtggagatgtcgatggcttgcagggttccgtgtcccttgggcgctaccaccgtgcccttgtttttcattttggacggcggtggctctgttgcttcttgcatgtttagaagcggtgtcgagggcgcgcaccgggcggcaggggcggctcgggacccggcggcatggctggcagtggtacgtcggcgccgcgcgcgggtaggttctggtactgcgccctgagaagactcgcatgcgcgacgacgcggcggttgacatcctggatctgacgcctctgggtgaaagctaccggccccgtgagcttgaacctgaaagagagttcaacagaatcaatctcggtatcgttgacggcggcttgcctaaggatttcttgcacgtcaccagagttgtcctggtaggcgatctccgccatgaactgctcgatctcttcctcttgaagatctccgcggcccgctctctcgacggtggccgcgaggtcgttggagatgcgcccaatgagttgagagaatgcattcatgcccgcctcgttccagacgcggctgtagaccacggcccccacgggatctctcgcgcgcatgaccacctgggcgaggttgagctccacgtggcgggtgaagaccgcatagttgcataggcgctggaaaaggtagttgagtgtggtggcgatgtgctcggtgacgaagaaatacatgatccatcgtctcagcggcatctcgctgacatcgcccagagcttccaagcgctccatggcctcgtagaagtccacggcaaaattaaaaaactgggagtttcgcgcggacacggtcaactcctcttccagaagacggataagttcggcgatggtggtgcgcacctcgcgctcgaaagcccctgggatttcttcctcaatctcttcttcttccactaacatctcttcctcttcaggtggggctgcaggaggagggggaacgcggcgacgccggcggcgcacgggcagacggtcgatgaatctttcaatgacctctccgcggcggcggcgcatggtttcagtgacggcgcggccgttctcgcgcggtcgcagagtaaaaacaccgccgcgcatctccttaaagtggtgactgggaggttctccgtttgggagggagagggcgctgattatacattttattaattggcccgtagggactgcacgcagagatctgatcgtgtcaagatccacgggatctgaaaacctttcgacgaaagcgtctaaccagtcacagtcacaaggtaggctgagtacggcttcttgtgggcgggggtggttatgtgttcggtctgggtcttctgtttcttcttcatctcgggaaggtgagacgatgctgctggtgatgaaattaaagtaggcagttctaagacggcggatggtggcgaggagcaccaggtctttgggtccggcttgctggatacgcaggcgattggccattccccaagcattatcctgacatctagcaagatctttgtagtagtcttgcatgagccgttctacgggcacttcttcctcacccgttctgccatgcatacgtgtgagtccaaatccgcgcattggttgtaccagtgccaagtcagctacgactctttcggcgaggatggcttgctgtacttgggtaagggtggcttgaaagtcatcaaaatccacaaagcggtggtaagctcctgtattaatggtgtaagcacagttggccatgactgaccagttaactgtctggtgaccagggcgcacgagctcggtgtatttaaggcgcgaataggcgcgggtgtcaaagatgtaatcgttgcaggtgcgcaccagatactggtaccctataagaaaatgcggcggtggttggcggtagagaggccatcgttctgtagctggagcgccaggggcgaggtcttccaacataaggcggtgatagccgtagatgtacctggacatccaggtgattcctgcggcggtagtagaagcccgaggaaactcgcgtacgcggttccaaatgttgcgtagcggcatgaagtagttcattgtaggcacggtttgaccagtgaggcgcgcgcagtcattgatgctctatagacacggagaaaatgaaagcgttcagcgactcgactccgtagcctggaggaacgtgaacgggttgggtcgcggtgtaccccggttcgagacttgtactcgagccggccggagccgcggctaacgtggtattggcactcccgtctcgacccagcctacaaaaatccaggatacggaatcgagtcgttttgctggtttccgaatggcagggaagtgagtcctattttttttttttgccgctcagatgcatcccgtgctgcgacagatgcgcccccaacaacagcccccctcgcagcagcagcagcagcaatcacaaaaggctgtccctgcaactactgcaactgccgccgtgagcggtgcgggacagcccgcctatgatctggacttggaagagggcgaaggactggcacgtctaggtgcgccttcacccgagcggcatccgcgagttcaactgaaaaaagattctcgcgaggcgtatgtgccccaacagaacctatttagagacagaagcggcgaggagccggaggagatgcgagcttcccgctttaacgcgggtcgtgagctgcgtcacggtttggaccgaagacgagtgttgcgggacgaggatttcgaagttgatgaaatgacagggatcagtcctgccagggcacacgtggctgcagccaaccttgtatcggcttacgagcagacagtaaaggaagagcgtaacttccaaaagtcttttaataatcatgtgcgaaccctgattgcccgcgaagaagttacccttggtttgatgcatttgtgggatttgatggaagctatcattcagaaccctactagcaaacctctgaccgcccagctgtttctggtggtgcaacacagcagagacaatgaggctttcagagaggcgctgctgaacatcaccgaacccgaggggagatggttgtatgatcttatcaacattctacagagtatcatagtgcaggagcggagcctgggcctggccgagaaggtggctgccatcaattactcggttttgagcttgggaaaatattacgctcgcaaaatctacaagactccatacgttcccatagacaaggaggtgaagatagatgggttctacatgcgcatgacgctcaaggtcttgaccctgagcgatgatcttggggtgtatcgcaatgacagaatgcatcgcgcggttagcgccagcaggaggcgcgagttaagcgacagggaactgatgcacagtttgcaaagagctctgactggagctggaaccgagggtgagaattacttcgacatgggagctgacttgcagtggcagcctagtcgcagggctctgagcgccgcgacggcaggatgtgagcttccttacatagaagaggcggatgaaggcgaggaggaagagggcgagtacttggaagactgatggcacaacccgtgttttttgctagatggaacagcaagcaccggatcccgcaatgcgggcggcgctgcagagccagccgtccggcattaactcctcggacgattggacccaggccatgcaacgtatcatggcgttgacgactcgcaaccccgaagcctttagacagcaaccccaggccaaccgtctatcggccatcatggaagctgtagtgccttcccgctctaatcccactcatgagaaggtcctggccatcgtgaacgcgttggtggagaacaaagctattcgtccagatgaggccggactggtatacaacgctctcttagaacgcgtggctcgctacaacagtagcaatgtgcaaaccaatttggaccgtatgataacagatgtacgcgaagccgtgtctcagcgcgaaaggttccagcgtgatgccaacctgggttcgctggtggcgttaaatgctttcttgagtactcagcctgctaatgtgccgcgtggtcaacaggattatactaactttttaagtgctttgagactgatggtatcagaagtacctcagagcgaagtgtatcagtccggtcctgattacttctttcagactagcagacagggcttgcagacggtaaatctgagccaagcttttaaaaaccttaaaggtttgtggggagtgcatgccccggtaggagaaagagcaaccgtgtctagcttgttaactccgaactcccgcctattattactgttggtagctcctttcaccgacagcggtagcatcgaccgtaattcctatttgggttacctactaaacctgtatcgcgaagccatagggcaaagtcaggtggacgagcagacctatcaagaaattacccaagtcagtcgcgctttgggacaggaagacactggcagtttggaagccactctgaacttcttgcttaccaatcggtctcaaaagatccctcctcaatatgctcttactgcggaggaggagaggatccttagatatgtgcagcagagcgtgggattgtttctgatgcaagagggggcaactccgactgcagcactggacatgacagcgcgaaatatggagcccagcatgtatgccagtaaccgacctttcattaacaaactgctggactacttgcacagagctgccgctatgaactctgattatttcaccaatgccatcttaaacccgcactggctgcccccacctggtttctacacgggcgaatatgacatgcccgaccctaatgacggatttctgtgggacgacgtggacagcgatgttttttcacctctttctgatcatcgcacgtggaaaaaggaaggcggcgatagaatgcattcttctgcatcgctgtccggggtcatgggtgctaccgcggctgagcccgagtctgcaagtccttttcctagtctacccttttctctacacagtgtacgtagcagcgaagtgggtagaataagtcgcccgagtttaatgggcgaagaggagtatctaaacgattccttgctcagaccggcaagagaaaaaaatttcccaaacaatggaatagaaagtttggtggataaaatgagtagatggaagacttatgctcaggatcacagagacgagcctgggatcatggggattacaagtagagcgagccgtagacgccagcgccatgacagacagaggggtcttgtgtgggacgatgaggattcggccgatgatagcagcgtgctggacttgggtgggagaggaaggggcaacccgtttgctcatttgcgccctcgcttgggtggtatgttgtaaaaaaaaataaaaaaaaaactcaccaaggccatggcgacgagcgtacgttcgttcttctttattatctgtgtctagtataatgaggcgagtcgtgctaggcggagcggtggtgtatccggagggtcctcctccttcgtacgagagcgtgatgcagcagcagcaggcgacggcggtgatgcaatccccactggaggctccctttgtgcctccgcgatacctggcacctacggagggcagaaacagcattcgttattcggaactggcacctcagtacgataccaccaggttgtatctggtggacaacaagtcggcggacattgcttctctgaactatcagaatgaccacagcaacttcttgaccacggtggtgcaaaacaatgactttacccctacggaagccagcacccagaccattaactttgatgaacgatcgcggtggggcggtcagctaaagaccatcatgcatactaacatgccaaacgtgaacgagtatatgtttagtaacaagttcaaagcgcgtgtgatggtgtccagaaaacctcccgacggtgctgcagttggggatacttatgatcacaagcaggatattttgaaatatgagtggttcgagtttactttgccagaaggcaacttttcagttactatgactattgatttgatgaacaatgccatcatagataattacttgaaagtgggtagacagaatggagtgcttgaaagtgacattggtgttaagttcgacaccaggaacttcaagctgggatgggatcccgaaaccaagttgatcatgcctggagtgtatacgtatgaagccttccatcctgacattgtcttactgcctggctgcggagtggattttaccgagagtcgtttgagcaaccttcttggtatcagaaaaaaacagccatttcaagagggttttaagattttgtatgaagatttagaaggtggtaatattccggccctcttggatgtagatgcctatgagaacagtaagaaagaacaaaaagccaaaatagaagctgctacagctgctgcagaagctaaggcaaacatagttgccagcgactctacaagggttgctaacgctggagaggtcagaggagacaattttgcgccaacacctgttccgactgcagaatcattattggccgatgtgtctgaaggaacggacgtgaaactcactattcaacctgtagaaaaagatagtaagaatagaagctataatgtgttggaagacaaaatcaacacagcctatcgcagttggtatctttcgtacaattatggcgatcccgaaaaaggagtgcgttcctggacattgctcaccacctcagatgtcacctgcggagcagagcaggtctactggtcgcttccagacatgatgaaggatcctgtcactttccgctccactagacaagtcagtaactaccctgtggtgggtgcagagcttatgcccgtcttctcaaagagcttctacaacgaacaagctgtgtactcccagcagctccgccagtccacctcgcttacgcacgtcttcaaccgctttcctgagaaccagattttaatccgtccgccggcgcccaccattaccaccgtcagtgaaaacgttcctgctctcacagatcacgggaccctgccgttgcgcagcagtatccggggagtccaacgtgtgaccgttactgacgccagacgccgcacctgtccctacgtgtacaaggcactgggcatagtcgcaccgcgcgtcctttcaagccgcactttctaaaaaaaaaaaaaatgtccattcttatctcgcccagtaataacaccggttggggtctgcgcgctccaagcaagatgtacggaggcgcacgcaaacgttctacccaacatcctgtccgtgttcgcggacattttcgcgctccatggggcgccctcaagggccgcactcgcgttcgaaccaccgtcgatgatgtaatcgatcaggtggttgccgacgcccgtaattatactcctactgcgcctacatctactgtggatgcagttattgacagtgtagtggctgacgctcgcaactatgctcgacgtaagagccggcgaaggcgcattgccagacgccaccgagctaccactgccatgcgagccgcaagagctctgctacgaagagctagacgcgtggggcgaagagccatgcttagggcggccagacgtgcagcttcgggcgccagcgccggcaggtcccgcaggcaagcagccgctgtcgcagcggcgactattgccgacatggcccaatcgcgaagaggcaatgtatactgggtgcgtgacgctgccaccggtcaacgtgtacccgtgcgcacccgtccccctcgcacttagaagatactgagcagtctccgatgttgtgtcccagcggcgaggatgtccaagcgcaaatacaaggaagaaatgctgcaggttatcgcacctgaagtctacggccaaccgttgaaggatgaaaaaaaaccccgcaaaatcaagcgggttaaaaaggacaaaaaagaagaggaagatggcgatgatgggctggcggagtttgtgcgcgagtttgccccacggcgacgcgtgcaatggcgtgggcgcaaagttcgacatgtgttgagacctggaacttcggtggtctttacacccggcgagcgttcaagcgctacttttaagcgttcctatgatgaggtgtacggggatgatgatattcttgagcaggcggctgaccgattaggcgagtttgcttatggcaagcgtagtagaataacttccaaggatgagacagtgtcgatacccttggatcatggaaatcccacccctagtcttaaaccggtcactttgcagcaagtgttacccgtaactccgcgaacaggtgttaaacgcgaaggtgaagatttgtatcccactatgcaactgatggtacccaaacgccagaagttggaggacgttttggagaaagtaaaagtggatccagatattcaacctgaggttaaagtgagacccattaagcaggtagcgcctggtctgggggtacaaactgtagacattaagattcccactgaaagtatggaagtgcaaactgaacccgcaaagcctactgccacctccactgaagtgcaaacggatccatggatgcccatgcctattacaactgacgccgccggtcccactcgaagatcccgacgaaagtacggtccagcaagtctgttgatgcccaattatgttgtacacccatctattattcctactcctggttaccgaggcactcgctactatcgcagccgaaacagtacctcccgccgtcgccgcaagacacctgcaaatcgcagtcgtcgccgtagacgcacaagcaaaccgactcccggcgccctggtgcggcaagtgtaccgcaatggtagtgcggaacctttgacactgccgcgtgcgcgttaccatccgagtatcatcacttaatcaatgttgccgctgcctccttgcagatatggccctcacttgtcgccttcgcgttcccatcactggttaccgaggaagaaactcgcgccgtagaagagggatgttgggacgcggaatgcgacgctacaggcgacggcgtgctatccgcaagcaattgcggggtggttttttaccagccttaattccaattatcgctgctgcaattggcgcgataccaggcatagcttccgtggcggttcaggcctcgcaacgacattgacattggaaaaaaacgtataaataaaaaaaaaaaaatacaatggactctgacactcctggtcctgtgactatgttttcttagagatggaagacatcaatttttcatccttggctccgcgacacggcacgaagccgtacatgggcacctggagcgacatcggcacgagccaactgaacgggggcgccttcaattggagcagtatctggagcgggcttaaaaattttggctcaaccataaaaacatacgggaacaaagcttggaacagcagtacaggacaggcgcttagaaataaacttaaagaccagaacttccaacaaaaagtagtcgatgggatagcttccggcatcaatggagtggtagatttggctaaccaggctgtgcagaaaaagataaacagtcgtttggacccgccgccagcaaccccaggtgaaatgcaagtggaggaagaaattcctccgccagaaaaacgaggcgacaagcgtccgcgtcccgatttggaagagacgctggtgacgcgcgtagatgaaccgccttcttatgaggaagcaacgaagcttggaatgcccaccactagaccgatagccccaatggccaccggggtgatgaaaccttctcagttgcatcgacccgtcaccttggatttgccccctccccctgctgctactgctgtacccgcttctaagcctgtcgctgccccgaaaccagtcgccgtagccaggtcacgtcccgggggcgctcctcgtccaaatgcgcactggcaaaatactctgaacagcatcgtgggtctaggcgtgcaaagtgtaaaacgccgtcgctgcttttaattaaatatggagtagcgcttaacttgcctatctgtgtatatgtgtcattacacgccgtcacagcagcagaggaaaaaaggaagaggtcgtgcgtcgacgctgagttactttcaagatggccaccccatcgatgctgccccaatgggcatacatgcacatcgccggacaggatgcttcggagtacctgagtccgggtctggtgcagttcgcccgcgccacagacacctacttcaatctgggaaataagtttagaaatcccaccgtagcgccgacccacgatgtgaccaccgaccgtagccagcggctcatgttgcgcttcgtgcccgttgaccgggaggacaatacatactcttacaaagtgcggtacaccctggccgtgggcgacaacagagtgctggatatggccagcacgttctttgacattaggggtgtgttggacagaggtcccagtttcaaaccctattctggtacggcttacaactccctggctcctaaaggcgctccaaatacatctcagtggattgcagaaggtgtaaaaaatacaactggtgaggaacacgtaacagaagaggaaaccaatactactacttacacttttggcaatgctcctgtaaaagctgaagctgaaattacaaaagaaggactcccagtaggtttggaagtttcagatgaagaaagtaaaccgatttatgctgataaaacatatcagccagaacctcagctgggagatgaaacttggactgaccttgatggaaaaaccgaaaagtatggaggcagggctctcaaacccgatactaagatgaaaccatgctacgggtcctttgccaaacctactaatgtgaaaggcggtcaggcaaaacaaaaaacaacggagcagccaaatcagaaagtcgaatatgatatcgacatggagttttttgatgcggcatcgcagaaaacaaacttaagtcctaaaattgtcatgtatgcagaaaatgtaaatttggaaactccagacactcatgtagtgtacaaacctggaacagaagacacaagttccgaagctaatttgggacaacaatctatgcccaacagacccaactacattggcttcagagataactttattggacttatgtactataacagtactggtaacatgggggtgctggctggtcaagcgtctcagttaaatgcagtggttgacttgcaggacagaaacacagaactttcttaccaactcttgcttgactctctgggcgacagaaccagatactttagcatgtggaatcaggctgtggacagttatgatcctgatgtacgtgttattgaaaatcatggtgtggaagatgaacttcccaactactgttttccactggacggcataggtgttccaacaaccagttacaaatcaatagttccaaatggagacaatgcgcctaattggaaggaacctgaagtaaatggaacaagtgagatcggacagggtaatttgtttgccatggaaattaaccttcaagccaatctatggcgaagtttcctttattccaatgtggctctatatctcccagactcgtacaaatacaccccgtccaatgtcactcttccagaaaacaaaaacacctacgactacatgaacgggcgggtggtgccgccatctctagtagacacctatgtgaacattggtgccaggtggtctctggatgccatggacaatgtcaacccattcaaccaccaccgtaacgctggcttgcgttaccgatccatgcttctgggtaacggacgttatgtgcctttccacatacaagtgcctcaaaaattcttcgctgttaaaaacctgctgcttctcccaggctcctacacttatgagtggaactttaggaaggatgtgaacatggttctacagagttccctcggtaacgacctgcgggtagatggcgccagcatcagtttcacgagcatcaacctctatgctacttttttccccatggctcacaacaccgcttccacccttgaagccatgctgcggaatgacaccaatgatcagtcattcaacgactacctatctgcagctaacatgctctaccccattcctgccaatgcaaccaatattcccatttccattccttctcgcaactgggcggctttcagaggctggtcatttaccagactgaaaaccaaagaaactccctctttggggtctggatttgacccctactttgtctattctggttctattccctacctggatggtaccttctacctgaaccacacttttaagaaggtttccatcatgtttgactcttcagtgagctggcctggaaatgacaggttactatctcctaacgaatttgaaataaagcgcactgtggatggcgaaggctacaacgtagcccaatgcaacatgaccaaagactggttcttggtacagatgctcgccaactacaacatcggctatcagggcttctacattccagaaggatacaaagatcgcatgtattcatttttcagaaacttccagcccatgagcaggcaggtggttgatgaggtcaattacaaagacttcaaggccgtcgccataccctaccaacacaacaactctggctttgtgggttacatggctccgaccatgcgccaaggtcaaccctatcccgctaactatccctatccactcattggaacaactgccgtaaatagtgttacgcagaaaaagttcttgtgtgacagaaccatgtggcgcataccgttctcgagcaacttcatgtctatgggggcccttacagacttgggacagaatatgctctatgccaactcagctcatgctctggacatgacctttgaggtggatcccatggatgagcccaccctgctttatcttctcttcgaagttttcgacgtggtcagagtgcatcagccacaccgcggcatcatcgaggcagtctacctgcgtacaccgttctcggccggtaacgctaccacgtaagaagcttcttgcttcttgcaaatagcagctgcaaccatggcctgcggatcccaaaacggctccagcgagcaagagctcagagccattgtccaagacctgggttgcggaccctattttttgggaacctacgataagcgcttcccggggttcatggcccccgataagctcgcctgtgccattgtaaatacggccggacgtgagacggggggagagcactggttggctttcggttggaacccacgttctaacacctgctacctttttgatccttttggattctcggatgatcgtctcaaacagatttaccagtttgaatatgagggtctcctgcgccgcagcgctcttgctaccaaggaccgctgtattacgctggaaaaatctacccagaccgtgcagggtccccgttctgccgcctgcggacttttctgctgcatgttccttcacgcctttgtgcactggcctgaccgtcccatggacggaaaccccaccatgaaattgctaactggagtgccaaacaacatgcttcattctcctaaagtccagcccaccctgtgtgacaatcaaaaagcactctaccattttcttaatacccattcgccttattttcgctcccatcgtacacacatcgaaagggccactgcgttcgaccgtatggatgttcaataatgactcatgtaaacaacgtgttcaataaacatcactttatttttttacatgtatcaaggctctgcattacttatttatttacaagtcgaatgggttctgacgagaatcagaatgacccgcaggcagtgatacgttgcggaactgatacttgggttgccacttgaattcgggaatcaccaacttgggaaccggtatatcgggcaggatgtcactccacagctttctggtcagctgcaaagctccaagcaggtcaggagccgaaatcttgaaatcacaattaggaccagtgctttgagcgcgagagttgcggtacaccggattgcagcactgaaacaccatcagcgacggatgtctcacgcttgccagcacggtgggatctgcaatcatgcccacatccagatcttcagcattggcaatgctgaacggggtcatcttgcaggtctgcctacccatggcgggcacccaattaggcttgtggttgcaatcgcagtgcagggggatcagtatcatcttggcctgatcctgtctgattcctggatacacggctctcatgaaagcatcatattgcttgaaagcctgctgggctttactaccctcggtataaaacatcccgcaggacctgctcgaaaactggttagctgcacagccggcatcattcacacagcagcgggcgtcattgttagctatttgcaccacacttctgccccagcggttttgggtgattttggttcgctcgggattctcctttaaggctcgttgtccgttctcgctggccacatccatctcgataatctgctccttctgaatcataatattgccatgcaggcacttcagcttgccctcataatcattgcagccatgaggccacaacgcacagcctgtacattcccaattatggtgggcgatctgagaaaaagaatgtatcattccctgcagaaatcttcccatcatcgtgctcagtgtcttgtgactagtgaaagttaactggatgcctcggtgctcctcgtttacgtactggtgacagatgcgcttgtattgttcgtgttgctcaggcattagtttaaaagaggttctaagttcgttatccagcctgtacttctccatcagcagacacatcacttccatgcctttctcccaagcagacaccaggggcaagctaatcggattcttaacagtgcaggcagcagctcctttagccagagggtcatctttagcgatcttctcaatgcttcttttgccatccttctcaacgatgcgcacgggcgggtagctgaaacccactgctacaagttgcgcctcttctctttcttcttcgctgtcttgactgatgtcttgcatggggatatgtttggtcttccttggcttctttttggggggtatcggaggaggaggactgtcgctccgttccggagacagggaggattgtgacgtttcgctcaccattaccaactgactgtcggtagaagaacctgaccccacacggcgacaggtgtttctcttcgggggcagaggtggaggcgattgcgaagggctgcggtccgacctggaaggcggatgactggcagaaccccttccgcgttcgggggtgtgctccctgtggcggtcgcttaactgatttccttcgcggctggccattgtgttctcctaggcagagaaacaacagacatggaaactcagccattgctgtcaacatcgccacgagtgccatcacatctcgtcctcagcgacgaggaaaaggagcagagcttaagcattccaccgcccagtcctgccaccacctctaccctagaagataaggaggtcgacgcatctcatgacatgcagaataaaaaagcgaaagagtctgagacagacatcgagcaagacccgggctatgtgacaccggtggaacacgaggaagagttgaaacgctttctagagagagaggatgaaaactgcccaaaacaacgagcagataactatcaccaagatgctggaaatagggatcagaacaccgactacctcatagggcttgacggggaagacgcgctccttaaacatctagcaagacagtcgctcatagtcaaggatgcattattggacagaactgaagtgcccatcagtgtggaagagctcagccgcgcctacgagcttaacctcttttcacctcgtactccccccaaacgtcagccaaacggcacctgcgagccaaatcctcgcttaaacttttatccagcttttgctgtgccagaagtactggctacctatcacatcttttttaaaaatcaaaaaattccagtctcctgccgcgctaatcgcacccgcgccgatgccctactcaatctgggacctggttcacgcttacctgatatagcttccttggaagaggttccaaagatcttcgagggtctgggcaataatgagactcgggccgcaaatgctctgcaaaagggagaaaatggcatggatgagcatcacagcgttctggtggaattggaaggcgataatgccagactcgcagtactcaagcgaagcatcgaggtcacacacttcgcatatcccgctgtcaacctgccccctaaagtcatgacggcggtcatggaccagttactcattaagcgcgcaagtcccctttcagaagacatgcatgacccagatgcctgtgatgagggtaaaccagtggtcagtgatgagcagctaacccgatggctgggcaccgactctcccagggatttggaagagcgtcgcaagcttatgatggccgtggtgctggttaccgtagaactagagtgtctccgacgtttctttaccgattcagaaaccttgcgcaaactcgaagagaatctgcactacacttttagacacggctttgtgcggcaggcatgcaagatatctaacgtggaactcaccaacctggtttcctacatgggtattctgcatgagaatcgcctaggacaaagcgtgctgcacagcaccctgaagggggaagcccgccgtgattacatccgcgattgtgtctatctgtacctgtgccacacgtggcaaaccggcatgggtgtatggcagcaatgtttagaagaacagaacttgaaagagcttgacaagctcttacagaaatctcttaaggttctgtggacagggttcgacgagcgcaccgtcgcttccgacctggcagacctcatcttcccagagcgtctcagggttactttgcgaaacggattgcctgactttatgagccagagcatgcttaacaattttcgctctttcatcctggaacgctccggtatcctgcccgccacctgctgcgcactgccctccgactttgtgcctctcacctaccgcgagtgccccccgccgctatggagtcactgctacctgttccgtctggccaactatctctcctaccactcggatgtgatcgaggatgtgagcggagacggcttgctggagtgtcactgccgctgcaatctgtgcacgccccaccggtccctagcttgcaacccccagttgatgagcgaaacccagataataggcacctttgaattgcaaggccccagcagccaaggcgatgggtcttctcctgggcaaagtttaaaactgaccccgggactgtggacctccgcctacttgcgcaagtttgctccggaagattaccacccctatgaaatcaagttctatgaggaccaatcacagcctccaaaggccgaactttcggcctgcgtcatcacccagggggcaattctggcccaattgcaagccatccaaaaatcccgccaagaatttctactgaaaaagggtaagggggtctaccttgacccccagaccggcgaggaactcaacacaaggttccctcaggatgtcccaacgacgagaaaacaagaagttgaaggtgcagccgccgcccccagaagatatggaggaagattgggacagtcaggcagaggaggcggaggaggacagtctggaggacagtctggaggaagacagtttggaggaggaaaacgaggaggcagaggaggtggaagaagtaaccgccgacaaacagttatcctcggctgcggagacaagcaacagcgctaccatctccgctccgagtcgaggaacccggcggcgtcccagcagtagatgggacgagaccggacgcttcccgaacccaaccagcgcttccaagaccggtaagaaggatcggcagggatacaagtcctggcgggggcataagaatgccatcatctcctgcttgcatgagtgcgggggcaacatatccttcacgcggcgctacttgctattccaccatggggtgaactttccgcgcaatgttttgcattactaccgtcacctccacagcccctactatagccagcaaatcccggcagtctcgacagataaagacagcggcggcgacctccaacagaaaaccagcagcggcagttagaaaatacacaacaagtgcagcaacaggaggattaaagattacagccaacgagccagcgcaaacccgagagttaagaaatcggatctttccaaccctgtatgccatcttccagcagagtcggggtcaagagcaggaactgaaaataaaaaaccgatctctgcgttcgctcaccagaagttgtttgtatcacaagagcgaagatcaacttcagcgcactctcgaggacgccgaggctctcttcaacaagtactgcgcgctgactcttaaagagtaggcagcgaccgcgcttattcaaaaaaggcgggaattacatcatcctcgacatgagtaaagaaattcccacgccttacatgtggagttatcaaccccaaatgggattggcggcaggcgcctcccaggactactccacccgcatgaattggctcagcgccgggccttctatgatttctcgagttaatgatatacgcgcctaccgaaaccaaatacttttggaacagtcagctcttaccaccacgccccgccaacaccttaatcccagaaattggcccgccgccctagtgtaccaggaaagtcccgctcccaccactgtattacttcctcgagacgcccaggccgaagtccaaatgactaatgcaggtgcgcagttagctggcggctccaccctatgtcgtcacaggcctcggcataatataaaacgcctgatgatcagaggccgaggtatccagctcaacgacgagtcggtgagctctccgcttggtctacgaccagacggaatctttcagattgccggctgcgggagatcttccttcacccctcgtcaggctgttctgactttggaaagttcgtcttcgcaaccccgctcgggcggaatcgggaccgttcaatttgtggaggagtttactccctctgtctacttcaaccccttctccggatctcctgggcattacccggacgagttcataccgaacttcgacgcgattagcgagtcagtggacggctacgattgatgtctggtgacgcggctgagctatctcggctgcgacatctagaccactgccgccgctttcgctgctttgcccgggaactcattgagttcatctacttcgaactccccaaggatcaccctcaaggtccggcccacggagtgcggatttctatcgaaggcaaaatagactctcgcctgcaacgaattttctcccagcggcccgtgctgatcgagcgagaccagggaaacaccacggtttccatctactgcatttgtaatcaccccggattgcatgaaagcctttgctgtcttatgtgtactgagtttaataaaaactgaattaagactctcctacggactgccgcttcttcaacccggattttacaaccagaagaacgaaacttttcctgtcgtccaggactctgttaacttcacctttcctactcacaaactagaagctcaacgactacaccgcttttccagaagcattttccctactaatactactttcaaaaccggaggtgagctccaaggtcttcctacagaaaacccttgggtggaagcgggccttgtagtgctaggaattcttgcgggtgggcttgtgattattctttgctacctatacacaccttgcttcactttcttagtggtgttgtggtattggtttaaaaaatggggcccatactagtcttgcttgttttactttcgcttttggaaccgggttctgccaattacgatccatgtctagacttcgacccagaaaactgcacacttacttttgcacccgacacaagccgcatctgtggagttcatcgcctctcttacgaacttggcccccaacgacaaaaatttacctgcatggtgggaatcaaccccatagttatcacccagcaaagtggagatactaagggttgcattcactgctcctgcgattccatcgagtgcacctacaccctgctgaagaccctatgcggcctaagagacctgctaccaatgaattaaaaaatgattaataaaaaatcacttacttgaaatcagcaataaggtctctgttgaaattttctcccagcagcacctcacttccctcttcccaactctggtattctaaaccccgttcagcggcatactttctccatactttaaaggggatgtcaaattttagctcctctcctgtacccacaatcttcatgtctttcttcccagatgaccaagagagtccggctcagtgactccttcaaccctgtctacccctatgaagatgaaagcacctcccaacacccctttataaacccagggtttatttccccaaatggcttcacacaaagcccaaacggagttcttactttaaaatgtttaaccccactaacaaccacaggcggatctctacagctaaaagtgggagggggacttacagtggatgacaccaacggttttttgaaagaaaacataagtgccaccacaccactcgttaagactggtcactctataggtttaccactaggagccggattgggaacgaatgaaaataaactttgtatcaaattaggacaaggacttacattcaattcaaacaacatttgcattgatgacaatattaacaccttatggacaggagtcaaccccaccgaagccaactgtcaaatcatgaactccagtgaatctaatgattgcaaattaattctaacactagttaaaactggagcactagtcactgcatttgtttatgttataggagtatctaacaattttaatatgctaactacacacagaaatataaattttactgcagagctgtttttcgattctactggtaatttactaactagactctcatccctcaaaactccacttaatcataaatcaggacaaaacatggctactggtgccattactaatgctaaaggtttcatgcccagcacgactgcctatcctttcaatgataattctagagaaaaagaaaactacatttacggaacttgttactacacagctagtgatcgcactgcttttcccattgacatatctgtcatgcttaaccgaagagcaataaatgacgagacatcatattgtattcgtataacttggtcctggaacacaggagatgccccagaggtgcaaacctctgctacaaccctagtcacctccccatttaccttttactacatcagagaagacgactgacaaataaagtttgcgatcgccaggcccaccatgtgtcaccagcagttggtcatctcttggttttccctggtttttctggcatctcccctcgtggccatatgggaactgaagaaagatgtttatgtcgtagaattggattggtatccggatgcccctggagaaatggtggtcctcacctgtgacacccctgaagaagatggtatcacctggaccttggaccagagcagtgaggtcttaggctctggcaaaaccctgaccatccaagtcaaagagtttggagatgctggccagtacacctgtcacaaaggaggcgaggttctaagccattcgctcctgctgcttcacaaaaaggaagatggaatttggtccactgatattttaaaggaccagaaagaacccaaaaataagacctttctaagatgcgaggccaagaattattctggacgtttcacctgctggtggctgacgacaatcagtactgatttgacattcagtgtcaaaagcagcagaggctcttctgacccccaaggggtgacgtgcggagctgctacactctctgcagagagagtcagaggggacaacaaggagtatgagtactcagtggagtgccaggaggacagtgcctgcccagctgctgaggagagtctgcccattgaggtcatggtggatgccgttcacaagctcaagtatgaaaactacaccagcagcttcttcatcagggacatcatcaaacctgacccacccaagaacttgcagctgaagccattaaagaattctcggcaggtggaggtcagctgggagtaccctgacacctggagtactccacattcctacttctccctgacattctgcgttcaggtccagggcaagagcaagagagaaaagaaagatagagtcttcacggacaagacctcagccacggtcatctgccgcaaaaatgccagcattagcgtgcgggcccaggaccgctactatagctcatcttggagcgaatgggcatctgtgccctgcagtggagggggcggcagcgggggaggcggcagcggcggcgggggatcgagaaacctccccgtggccactccagacccaggaatgttcccatgccttcaccactcccaaaacctgctgagggccgtcagcaacatgctccagaaggccagacaaactctagaattttacccttgcacttctgaagagattgatcatgaagatatcacaaaagataaaaccagcacagtggaggcctgtttaccattggaattaaccaagaatgagagttgcctaaattccagagagacctctttcataactaatgggagttgcctggcctccagaaagacctcttttatgatggccctgtgccttagtagtatttatgaagacttgaagatgtaccaggtggagttcaagaccatgaatgcaaagcttctgatggatcctaagaggcagatctttctagatcaaaacatgctggcagttattgatgagctgatgcaggccctgaatttcaacagtgagactgtgccacaaaaatcctcccttgaagaaccggatttttataaaactaaaatcaagctctgcatacttcttcatgctttcagaattcgggcagtgactattgatagagtgatgagctatctgaatgcttccggaagcggagctactaacttcagcctgctgaagcaggctggagacgtggaggagaaccctggacctaagaaaagtggtgttcttttcctcttgggcatcatcttgctggttctgattggagtgcaaggaaccccagtagtgagaaagggtcgctgttcctgcatcagcaccaaccaagggactatccacctacaatccttgaaagaccttaaacaatttgccccaagcccttcctgcgagaaaattgaaatcattgctacactgaagaatggagttcaaacatgtctaaacccagattcagcagatgtgaaggaactgattaaaaagtgggagaaacaggtcagccaaaagaaaaagcaaaagaatgggaaaaaacatcaaaaaaagaaagttctgaaagttcgaaaatctcaacgttctcgtcaaaagaagactacaggaagcggacagtgtactaattatgctctcttgaaattggctggagatgttgagagcaaccctggacctgactggacctggcgcatcctgttcttggtggcagctgctacgggagctcattccaactgggtgaatgtaataagtgatttgaaaaaaattgaagatcttattcaatctatgcatattgatgctactttatatacggaaagtgatgttcaccccagttgcaaagtaacagcaatgaagtgctttctcttggagttacaagttatttcacttgagtccggagatgcaagtattcatgatacagtagaaaatctgatcatcctagcaaacaacagtttgtcttctaatgggaatgtaacagaatctggatgcaaagaatgtgaggaactggaggaaaaaaatattaaagaatttttgcagagttttgtacatattgtccaaatgttcatcaacacttctggaagcggagagggcagaggaagtctgctaacatgcggtgacgtcgaggagaatcctggacctgctcagtcactggctctgagcctccttatcctggttctggcctttggcatccccaggacccaaggcagtgatggaggggctcaggactgttgcctcaagtacagccaaaggaagattcccgccaaggttgtccgcagctaccggaagcaggaaccaagcttaggctgctccatcccagctatcctgttcttgccccgcaagcgctctcaggcagagctatgtgcagacccaaaggagctctgggtgcagcagctgatgcagcatctggacaagacaccatccccacagaaaccagcccagggctgcaggaaggacaggggggcctccaagactggcaagaaaggaaagggctccaaaggctgcaagaggactgagcggtcacagacccctaaagggccaggaagcggagtgaaacagactttgaattttgaccttctcaagttggcgggagacgtggagtccaaccctggacctgccttgacctttgctttactggtggccctcctggtgctcagctgcaagtcaagctgctctgtgggctgtgatctgcctcaaacccacagcctgggtagcaggaggaccttgatgctcctggcacagatgaggagaatctctcttttctcctgcttgaaggacagacatgactttggatttccccaggaggagtttggcaaccagttccaaaaggctgaaaccatccctgtcctccatgagatgatccagcagatcttcaatctcttcagcacaaaggactcatctgctgcttgggatgagaccctcctagacaaattctacactgaactctaccagcagctgaatgacctggaagcctgtgtgatacagggggtgggggtgacagagactcccctgatgaaggaggactccattctggctgtgaggaaatacttccaaagaatcactctctatctgaaagagaagaaatacagcccttgtgcctgggaggttgtcagagcagaaatcatgagatctttttctttgtcaacaaacttgcaagaaagtttaagaagtaaggaataagctagcttgactgactgagatacagcgtaccttcagctcacagacatgataagatacattgatgagtttggacaaaccacaactagaatgcagtgaaaaaaatgctttatttgtgaaatttgtgatgctattgctttatttgtaaccattataagctgcaataaacaagttaacaacaacaattgcattcattttatgtttcaggttcagggggaggtgtgggaggttttttaaagcaagtaaaacctctacaaatgtggtagtcgtcagctatcctgcaggaacttgtttatttgaaaatcaattcacaaaatccgagtagttattttgcctcccccttcccatttaacagaatacaccaatctctccccacgcacagctttaaacatttggataccattagatatagacatggttttagattccacattccaaacagtttcagagcgagccaatctggggtcagtgatagataaaaatccatcgggatagtcttttaaagcgctttcacagtccaactgctgcggatgcgactccggagtctggatcacggtcatctggaagaagaacgatgggaatcataatccgaaaacggtatcggacgattgtgtctcatcaaacccacaagcagccgctgtctgcgtcgctccgtgcgactgctgtttatgggatcagggtccacagtgtcctgaagcatgattttaatagcccttaacatcaactttctggtgcgatgcgcgcagcaacgcattctgatttcactcaaatctttgcagtaggtacaacacattattacaatattgtttaataaaccataattaaaagcgctccagccaaaactcatatctgatataatcgcccctgcatgaccatcataccaaagtttaatataaattaaatgacgttccctcaaaaacacactacccacatacatgatctcttttggcatgtgcatattaacaatctgtctgtaccatggacaacgttggttaatcatgcaacccaatataaccttccggaaccacactgccaacaccgctcccccagccatgcattgaagtgaaccctgctgattacaatgacaatgaagaacccaattctctcgaccgtgaatcacttgagaatgaaaaatatctatagtggcacaacatagacataaatgcatgcatcttctcataatttttaactcctcaggatttagaaacatatcccagggaataggaagctcttgcagaacagtaaagctggcagaacaaggaagaccacgaacacaacttacactatgcatagtcatagtatcacaatctggcaacagcgggtggtcttcagtcatagaagctcgggtttcattttcctcacaacgtggtaactgggctctggtgtaagggtgatgtctggcgcatgatgtcgagcgtgcgcgcaaccttgtcataatggagttgcttcctgacattctcgtattttgtatagcaaaacgcggccctggcagaacacactcttcttcgccttctatcctgccgcttagcgtgttccgtgtgatagttcaagtacaaccacactcttaagttggtcaaaagaatgctggcttcagttgtaatcaaaactccatcgcatctaatcgttctgaggaaatcatccaagcaatgcaactggattgtgtttcaagcaggagaggagagggaagagacggaagaaccatgttaatttttattccaaacgatctcgcagtacttcaaattgtagatcgcgcagatggcatctctcgcccccactgtgttggtgaaaaagcacagctagatcaaaagaaatgcgattttcaaggtgctcaacggtggcttccagcaaagcctccacgcgcacatccaagaacaaaagaataccaaaagaaggagcattttctaactcctcaatcatcatattacattcctgcaccattcccagataattttcagctttccagccttgaattattcgtgtcagttcttgtggtaaatccaatccacacattacaaacaggtcccggagggcgccctccaccaccattcttaaacacaccctcataatgacaaaatatcttgctcctgtgtcacctgtagcgaattgagaatggcaacatcaattgacatgcccttggctctaagttcttctttaagttctagttgtaaaaactctctcatattatcaccaaactgcttagccagaagccccccgggaacaagagcaggggacgctacagtgcagtacaagcgcagacctccccaattggctccagcaaaaacaagattggaataagcatattgggaaccgccagtaatatcatcgaagttgctggaaatataatcaggcagagtttcttgtaaaaattgaataaaagaaaaatttgccaaaaaaacattcaaaacctctgggatgcaaatgcaataggttaccgcgctgcgctccaacattgttagttttgaattagtctgcaaaaataaaaaaaaaaacaagcgtcatatcatagtagcctgacgaacagatggataaatcagtctttccatcacaagacaagccacagggtctccagctcgaccctcgtaaaacctgtcatcatgattaaacaacagcaccgaaagttcctcgcggtgaccagcatgaataattcttgatgaagcatacaatccagacatgttagcatcagttaacgagaaaaaacagccaacatagcctttgggtataattatgcttaatcgtaagtatagcaaagccacccctcgcggatacaaagtaaaaggcacaggagaataaaaaatataattatttctctgctgctgttcaggcaacgtcgcccccggtccctctaaatacacatacaaagcctcatcagccatggcttaccagacaaagtacagcgggcacacaaagcacaagctctaaagtgactctccaacctctccacaatatatatatacacaagccctaaactgacgtaatgggagtaaagtgtaaaaaatcccgccaaacccaacacacaccccgaaactgcgtcaccagggaaaagtacagtttcacttccgcaatcccaacaggcgtaacttcctctttctcacggtacgtgatatcccactaacttgcaacgtcattttcccacggtcgcaccgccccttttagccgttaaccccacagccaatcaccacacgatccacactttttaaaatcacctcatttacatattggcaccattccatctataaggtatattatatagataga

SEQ ID NO: 85 - DNA, 36250 bp, Artificial Sequence
  Genome sequence of NG-723 virus
tctatctatataatataccttatagatggaatggtgccaatatgtaaatgaggtgattttaaaaagtgtggatcgtgtggtgattggctgtggggttaacggctaaaaggggcggtgcgaccgtgggaaaatgacgttttgtgggggtggagtttttttgcaagttgtcgcgggaaatgtgacgcataaaaaggcttttttctcacggaactacttagttttcccacggtatttaacaggaaatgaggtagttttgaccggatgcaagtgaaaattgttgattttcgcgcgaaaactgaatgaggaagtgtttttctgaataatgtggtatttatggcagggtggagtatttgttcagggccaggtagactttgacccattacgtggaggtttcgattaccgtgttttttacctgaatttccgcgtaccgtgtcaaagtcttctgtttttacgtaggtgtcagctgatcgctagggtatttatacctcagggtttgtgtcaagaggccactcttgagtgccagcgagaagagttttctcctctgcgccggcagtttaataataaaaaaatgagagatttgcgatttctgcctcaggaaataatctctgctgagactggaaatgaaatattggagcttgtggtgcacgccctgatgggagacgatccggagccacctgtgcagctttttgagcctcctacgcttcaggaactgtatgatttagaggtagagggatcggaggattctaatgaggaagctgtaaatggcttttttaccgattctatgcttttagctgctaatgaagggttagaattagatccgcctttggacacttttgatactccaggggtaattgtggaaagcggtacaggtgtaagaaaattacctgatttgagttccgtggactgtgatttgcactgctatgaagacgggtttcctccgagtgatgaggaggaccatgaaaaggagcagtccatgcagactgcagcgggtgagggagtgaaggctgccaatgttggttttcagttggattgcccggagcttcctggacatggctgtaagtcttgtgaatttcacaggaaaaatactggagtaaaggaactgttatgttcgctttgttatatgagaacgcactgccactttatttacagtaagtgtgtttaagttaaaatttaaaggaatatgctgtttttcacatgtatattgagtgtgagttttgtgcttcttattataggtcctgtgtctgatgctgatgaatcaccatctcctgattctactacctcacctcctgagattcaagcacctgttcctgtggacgtgcgcaagcccattcctgtgaagcttaagcctgggaaacgtccagcagtggaaaaacttgaggacttgttacagggtggggacggacctttggacttgagtacacggaaacgtccaagacaataagtgttccatatccgtgtttacttaaggtgacgtcaatatttgtgtgacagtgcaatgtaataaaaatatgttaactgttcactggtttttattgctttttgggcggggactcaggtatataagtagaagcagacctgtgtggttagctcataggagctggctttcatccatggaggtttgggccattttggaagaccttaggaagactaggcaactgttagagaacgcttcggacggagtctccggtttttggagattctggttcgctagtgaattagctagggtagtttttaggataaaacaggactataaacaagaatttgaaaagttgttggtagattgcccaggactttttgaagctcttaatttgggccatcaggttcactttaaagaaaaagttttatcagttttagacttttcaaccccaggtagaactgctgctgctgtggcttttcttacttttatattagataaatggatcccgcagactcatttcagcaggggatacgttttggatttcatagccacagcattgtggagaacatggaaggttcgcaagatgaggacaatcttaggttactggccagtgcagcctttgggtgtagcgggaatcctgaggcatccaccggtcatgccagcggttctggaggaggaacagcaagaggacaacccgagagccggcctggaccctccagtggaggaggcggagtagctgacttgtctcctgaactgcaacgggtgcttactggatctacgtccactggacgggataggggcgttaagagggagagggcatctagtggtactgatgctagatctgagttggctttaagtttaatgagtcgcagacgtcctgaaaccatttggtggcatgaggttcagaaagagggaagggatgaagtttctgtattgcaggagaaatattcactggaacaggtgaaaacatgttggttggagcctgaggatgattgggaggtggccattaaaaattatgccaagatagctttgaggcctgataaacagtataagattactagacggattaatatccggaatgcttgttacatatctggaaatggggctgaggtggtaatagatactcaagacaaggcagttattagatgctgcatgatggatatgtggcctggggtagtcggtatggaagcagtaacttttgtaaatgttaagtttaggggagatggttataatggaatagtgtttatggccaataccaaacttatattgcatggttgtagcttttttggtttcaacaatacctgtgtagatgcctggggacaggttagtgtacggggatgtagtttctatgcgtgttggattgccacagctggcagaaccaagagtcaattgtctctgaagaaatgcatatttcaaagatgtaacctgggcattctgaatgaaggcgaagcaagggtccgccactgcgcttctacagatactggatgttttattttgattaagggaaatgccagcgtaaagcataacatgatttgcggtgcttccgatgagaggccttatcaaatgctcacttgtgctggtgggcattgtaatatgctggctactgtgcatattgtttcccatcaacgcaaaaaatggcctgtttttgatcacaatgtgatgacgaagtgtaccatgcatgcaggtgggcgtagaggaatgtttatgccttaccagtgtaacatgaatcatgtgaaagtgttgttggaaccagatgccttttccagaatgagcctaacaggaatttttgacatgaacatgcaaatctggaagatcctgaggtatgatgatacgagatcgagggtacgcgcatgcgaatgcggaggcaagcatgccaggttccagccggtgtgtgtagatgtgactgaagatctcagaccggatcatttggttattgcccgcactggagcagagttcggatccagtggagaagaaactgactaaggtgagtattgggaaaactttggggtgggattttcagatggacagattgagtaaaaatttgttttttctgtcttgcagctgtcatgagtggaaacgcttcttttaaggggggagtcttcagcccttatctgacagggcgtctcccatcctgggcaggagttcgtcagaatgttatgggatctactgtggatggaagacccgtccaacccgccaattcttcaacgctgacctatgctactttaagttcttcacctttggacgcagctgcagctgccgccgccgcttctgttgccgctaacactgtgcttggaatgggttactatggaagcatcatggctaattccacttcctctaataacccttctaccctgactcaggacaagttacttgtccttttggcccagctggaggctttgacccaacgtctgggtgaactttctcagcaggtggtcgagttgcgagtacaaactgagtctgctgtcggcacggcaaagtctaaataaaaaaatcccagaatcaatgaataaataaacaagcttgttgttgatttaaaatcaagtgtttttatttcatttttcgcgcacggtatgccctagaccaccgatctctatcattgagaactcggtggattttttccaggatcctatagaggtgggattgaatgtttagatacatgggcattaggccgtctttggggtggagatagctccattgaagggattcatgctccggggtagtgttgtaaatcacccagtcataacaaggtcgcagtgcatggtgttgcacaatatcttttagaagtaggctgattgccacagataagcccttggtgtaggtgtttacaaaccggttgagctgggatgggtgcattcggggtgaaattatgtgcattttggattggatttttaagttggcaatattgccgccaagatcccgtcttgggttcatgttatgaaggaccaccaagacggtgtatccggtacatttaggaaatttatcgtgcagcttggatggaaaagcgtggaaaaatttggagacacccttgtgtcctccaagattttccatgcactcatccatgataatagcaatggggccgtgggcagcggcgcgggcaaacacgttccgtgggtctgacacatcatagttatgttcctgagttaaatcatcataagccattttaatgaatttggggcggagagtaccagattggggtatgaatgttccttcgggccccggagcatagttcccctcacagatttgcatttcccaagctttcagttccgagggtggaatcatgtccacctggggggctatgaaaaacaccgtttctggggcgggggtgattaattgtgatgatagcaaatttctgagcaattgagatttgccacatccggtggggccataaatgattccgattacgggttgcaggtggtagtttagggaacggcaactgccgtcttctcgaagcaagggggccacctcgttcatcatttcccttacatgcatattttcccgcaccaaatccattaggaggcgctctcctcctagtgatagaagttcttgtagtgaggaaaagtttttcagcggtttcagaccgtcagccatgggcattttggagagagtttgctgcaaaagttctagtctgttccacagttcagtgatgtgttctatggcatctcgatccagcagacctcctcgtttcgcgggtttggacggctcctggaatagggtatgagacgatgggcgtccagcgctgccagggttcggtccttccagggtctcagtgttcgagtcagggttgtttccgtcacagtgaaggggtgtgcgcctgcttgggcgcttgccagggtgcgcttcagactcatcctgctggtcgaaaacttctgtcgcttggcgccctgtatgtcggccaagtagcagtttaccatgagttcgtagttgagcgcctcggctgcgtggcctttggcgcggagcttacctttggaagttttcttgcataccgggcagtataggcatttcagcgcatacaacttgggcgcaaggaaaacggattctggggagtatgcatctgcgccgcaggaggcgcaaacagtttcacattccaccagccaggttaaatccggttcattggggtcaaaaacaagttttccgccatattttttgatgcgtttcttacctttggtctccatgagttcgtgtcctcgttgagtgacaaacaggctgtccgtgtccccgtagactgattttacaggcctcttctccagtggagtgcctcggtcttcttcgtacaggaactctgaccactctgatacaaaggcgcgcgtccaggccagcacaaaggaggctatgtgggaggggtagcgatcgttgtcaaccagggggtccaccttttccaaagtatgcaaacacatgtcaccctcttcaacatccaggaatgtgattggcttgtaggtgtatttcacgtgacctggggtccccgctgggggggtataaaagggggcggttctttgctcttcctcactgtcttccggatcgctgtccaggaacgtcagctgttggggtaggtattccctctcgaaggcgggcatgacctctgcactcaggttgtcagtttctaagaacgaggaggatttgatattgacagtgccggttgagatgcctttcatgaggttttcgtccatctggtcagaaaacacaatttttttattgtcaagtttggtggcaaatgatccatacagggcgttggataaaagtttggcaatggatcgcatggtttggttcttttccttgtccgcgcgctctttggcggcgatgttgagttggacatactcgcgtgccaggcacttccattcggggaagatagttgttaattcatctggcacgattctcacttgccaccctcgattatgcaaggtaattaaatccacactggtggccacctcgcctcgaaggggttcattggtccaacagagcctacctcctttcctagaacagaaagggggaagtgggtctagcataagttcatcgggagggtctgcatccatggtaaagattcccggaagtaaatccttatcaaaatagctgatgggagtggggtcatctaaggccatttgccattctcgagctgccagtgcgcgctcatatgggttaaggggactgccccatggcatgggatgggtgagtgcagaggcatacatgccacagatgtcatagacgtagatgggatcctcaaagatgcctatgtaggttggatagcatcgcccccctctgatacttgctcgcacatagtcatatagttcatgtgatggcgctagcagccccggacccaagttggtgcgattgggtttttctgttctgtagacgatctggcgaaagatggcgtgagaattggaagagatggtgggtctttgaaaaatgttgaaatgggcatgaggtagacctacagagtctctgacaaagtgggcataagattcttgaagcttggttaccagttcggcggtgacaagtacgtctagggcgcagtagtcaagtgtttcttgaatgatgtcataacctggttggtttttcttttcccacagttcgcggttgagaaggtattcttcgcgatccttccagtactcttctagcggaaacccgtctttgtctgcacggtaagatcctagcatgtagaactgattaactgccttgtaagggcagcagcccttctctacgggtagagagtatgcttgagcagcttttcgtagcgaagcgtgagtaagggcaaaggtgtctctgaccatgactttgaggaattggtatttgaagtcgatgtcgtcacaggctccctgttcccagagttggaagtctacccgtttcttgtaggcggggttgggcaaagcgaaagtaacatcattgaagagaatcttgccggccctgggcatgaaattgcgagtgatgcgaaaaggctgtggtacttccgctcggttattgataacctgggcagctaggacgatctcgtcgaaaccgttgatgttgtgtcctacgatgtataattctatgaaacgcggcgtgcctctgacgtgaggtagcttactgagctcatcaaaggttaggtctgtggggtcagataaggcgtagtgttcgagagcccattcgtgcaggtgaggattcgctttaaggaaggaggaccagaggtccactgccagtgctgtttgtaactggtcccggtactgacgaaaatgccgtccgactgccattttttctggggtgacgcaatagaaggtttgggggtcctgccgccagcgatcccacttgagttttatggcgaggtcataggcgatgttgacgagccgctggtctccagagagtttcatgaccagcatgaaggggattagctgcttgccaaaggaccccatccaggtgtaggtttccacatcgtaggtgagaaagagcctttctgtgcgaggatgagagccaatcgggaagaactggatctcctgccaccagttggaggaatggctgttgatgtgatggaagtagaactccctgcgacgcgccgagcattcatgcttgtgcttgtacagacggccgcagtagtcgcagcgttgcacgggttgtatctcgtgaatgagttgtacctggcttcccttgacgagaaatttcagtgggaagccgaggcctggcgattgtatctcgtgctttactatgttgtctgcatcggcctgttcatcttctgtctcgatggtggtcatgctgacgagccctcgcgggaggcaagtccagacctcggcgcggcaggggcggagctcgaggacgagagcgcgcaggctggagctgtccagggtcctgagacgctgcggactcaggttagtaggcagtgtcaggagattaacttgcatgatcttttggagggcgtgcgggaggttcagatagtacttgatctcaacgggtccgttggtggagatgtcgatggcttgcagggttccgtgtcccttgggcgctaccaccgtgcccttgtttttcattttggacggcggtggctctgttgcttcttgcatgtttagaagcggtgtcgagggcgcgcaccgggcggcaggggcggctcgggacccggcggcatggctggcagtggtacgtcggcgccgcgcgcgggtaggttctggtactgcgccctgagaagactcgcatgcgcgacgacgcggcggttgacatcctggatctgacgcctctgggtgaaagctaccggccccgtgagcttgaacctgaaagagagttcaacagaatcaatctcggtatcgttgacggcggcttgcctaaggatttcttgcacgtcaccagagttgtcctggtaggcgatctccgccatgaactgctcgatctcttcctcttgaagatctccgcggcccgctctctcgacggtggccgcgaggtcgttggagatgcgcccaatgagttgagagaatgcattcatgcccgcctcgttccagacgcggctgtagaccacggcccccacgggatctctcgcgcgcatgaccacctgggcgaggttgagctccacgtggcgggtgaagaccgcatagttgcataggcgctggaaaaggtagttgagtgtggtggcgatgtgctcggtgacgaagaaatacatgatccatcgtctcagcggcatctcgctgacatcgcccagagcttccaagcgctccatggcctcgtagaagtccacggcaaaattaaaaaactgggagtttcgcgcggacacggtcaactcctcttccagaagacggataagttcggcgatggtggtgcgcacctcgcgctcgaaagcccctgggatttcttcctcaatctcttcttcttccactaacatctcttcctcttcaggtggggctgcaggaggagggggaacgcggcgacgccggcggcgcacgggcagacggtcgatgaatctttcaatgacctctccgcggcggcggcgcatggtttcagtgacggcgcggccgttctcgcgcggtcgcagagtaaaaacaccgccgcgcatctccttaaagtggtgactgggaggttctccgtttgggagggagagggcgctgattatacattttattaattggcccgtagggactgcacgcagagatctgatcgtgtcaagatccacgggatctgaaaacctttcgacgaaagcgtctaaccagtcacagtcacaaggtaggctgagtacggcttcttgtgggcgggggtggttatgtgttcggtctgggtcttctgtttcttcttcatctcgggaaggtgagacgatgctgctggtgatgaaattaaagtaggcagttctaagacggcggatggtggcgaggagcaccaggtctttgggtccggcttgctggatacgcaggcgattggccattccccaagcattatcctgacatctagcaagatctttgtagtagtcttgcatgagccgttctacgggcacttcttcctcacccgttctgccatgcatacgtgtgagtccaaatccgcgcattggttgtaccagtgccaagtcagctacgactctttcggcgaggatggcttgctgtacttgggtaagggtggcttgaaagtcatcaaaatccacaaagcggtggtaagctcctgtattaatggtgtaagcacagttggccatgactgaccagttaactgtctggtgaccagggcgcacgagctcggtgtatttaaggcgcgaataggcgcgggtgtcaaagatgtaatcgttgcaggtgcgcaccagatactggtaccctataagaaaatgcggcggtggttggcggtagagaggccatcgttctgtagctggagcgccaggggcgaggtcttccaacataaggcggtgatagccgtagatgtacctggacatccaggtgattcctgcggcggtagtagaagcccgaggaaactcgcgtacgcggttccaaatgttgcgtagcggcatgaagtagttcattgtaggcacggtttgaccagtgaggcgcgcgcagtcattgatgctctatagacacggagaaaatgaaagcgttcagcgactcgactccgtagcctggaggaacgtgaacgggttgggtcgcggtgtaccccggttcgagacttgtactcgagccggccggagccgcggctaacgtggtattggcactcccgtctcgacccagcctacaaaaatccaggatacggaatcgagtcgttttgctggtttccgaatggcagggaagtgagtcctattttttttttttgccgctcagatgcatcccgtgctgcgacagatgcgcccccaacaacagcccccctcgcagcagcagcagcagcaatcacaaaaggctgtccctgcaactactgcaactgccgccgtgagcggtgcgggacagcccgcctatgatctggacttggaagagggcgaaggactggcacgtctaggtgcgccttcacccgagcggcatccgcgagttcaactgaaaaaagattctcgcgaggcgtatgtgccccaacagaacctatttagagacagaagcggcgaggagccggaggagatgcgagcttcccgctttaacgcgggtcgtgagctgcgtcacggtttggaccgaagacgagtgttgcgggacgaggatttcgaagttgatgaaatgacagggatcagtcctgccagggcacacgtggctgcagccaaccttgtatcggcttacgagcagacagtaaaggaagagcgtaacttccaaaagtcttttaataatcatgtgcgaaccctgattgcccgcgaagaagttacccttggtttgatgcatttgtgggatttgatggaagctatcattcagaaccctactagcaaacctctgaccgcccagctgtttctggtggtgcaacacagcagagacaatgaggctttcagagaggcgctgctgaacatcaccgaacccgaggggagatggttgtatgatcttatcaacattctacagagtatcatagtgcaggagcggagcctgggcctggccgagaaggtggctgccatcaattactcggttttgagcttgggaaaatattacgctcgcaaaatctacaagactccatacgttcccatagacaaggaggtgaagatagatgggttctacatgcgcatgacgctcaaggtcttgaccctgagcgatgatcttggggtgtatcgcaatgacagaatgcatcgcgcggttagcgccagcaggaggcgcgagttaagcgacagggaactgatgcacagtttgcaaagagctctgactggagctggaaccgagggtgagaattacttcgacatgggagctgacttgcagtggcagcctagtcgcagggctctgagcgccgcgacggcaggatgtgagcttccttacatagaagaggcggatgaaggcgaggaggaagagggcgagtacttggaagactgatggcacaacccgtgttttttgctagatggaacagcaagcaccggatcccgcaatgcgggcggcgctgcagagccagccgtccggcattaactcctcggacgattggacccaggccatgcaacgtatcatggcgttgacgactcgcaaccccgaagcctttagacagcaaccccaggccaaccgtctatcggccatcatggaagctgtagtgccttcccgctctaatcccactcatgagaaggtcctggccatcgtgaacgcgttggtggagaacaaagctattcgtccagatgaggccggactggtatacaacgctctcttagaacgcgtggctcgctacaacagtagcaatgtgcaaaccaatttggaccgtatgataacagatgtacgcgaagccgtgtctcagcgcgaaaggttccagcgtgatgccaacctgggttcgctggtggcgttaaatgctttcttgagtactcagcctgctaatgtgccgcgtggtcaacaggattatactaactttttaagtgctttgagactgatggtatcagaagtacctcagagcgaagtgtatcagtccggtcctgattacttctttcagactagcagacagggcttgcagacggtaaatctgagccaagcttttaaaaaccttaaaggtttgtggggagtgcatgccccggtaggagaaagagcaaccgtgtctagcttgttaactccgaactcccgcctattattactgttggtagctcctttcaccgacagcggtagcatcgaccgtaattcctatttgggttacctactaaacctgtatcgcgaagccatagggcaaagtcaggtggacgagcagacctatcaagaaattacccaagtcagtcgcgctttgggacaggaagacactggcagtttggaagccactctgaacttcttgcttaccaatcggtctcaaaagatccctcctcaatatgctcttactgcggaggaggagaggatccttagatatgtgcagcagagcgtgggattgtttctgatgcaagagggggcaactccgactgcagcactggacatgacagcgcgaaatatggagcccagcatgtatgccagtaaccgacctttcattaacaaactgctggactacttgcacagagctgccgctatgaactctgattatttcaccaatgccatcttaaacccgcactggctgcccccacctggtttctacacgggcgaatatgacatgcccgaccctaatgacggatttctgtgggacgacgtggacagcgatgttttttcacctctttctgatcatcgcacgtggaaaaaggaaggcggcgatagaatgcattcttctgcatcgctgtccggggtcatgggtgctaccgcggctgagcccgagtctgcaagtccttttcctagtctacccttttctctacacagtgtacgtagcagcgaagtgggtagaataagtcgcccgagtttaatgggcgaagaggagtatctaaacgattccttgctcagaccggcaagagaaaaaaatttcccaaacaatggaatagaaagtttggtggataaaatgagtagatggaagacttatgctcaggatcacagagacgagcctgggatcatggggattacaagtagagcgagccgtagacgccagcgccatgacagacagaggggtcttgtgtgggacgatgaggattcggccgatgatagcagcgtgctggacttgggtgggagaggaaggggcaacccgtttgctcatttgcgccctcgcttgggtggtatgttgtaaaaaaaaataaaaaaaaaactcaccaaggccatggcgacgagcgtacgttcgttcttctttattatctgtgtctagtataatgaggcgagtcgtgctaggcggagcggtggtgtatccggagggtcctcctccttcgtacgagagcgtgatgcagcagcagcaggcgacggcggtgatgcaatccccactggaggctccctttgtgcctccgcgatacctggcacctacggagggcagaaacagcattcgttattcggaactggcacctcagtacgataccaccaggttgtatctggtggacaacaagtcggcggacattgcttctctgaactatcagaatgaccacagcaacttcttgaccacggtggtgcaaaacaatgactttacccctacggaagccagcacccagaccattaactttgatgaacgatcgcggtggggcggtcagctaaagaccatcatgcatactaacatgccaaacgtgaacgagtatatgtttagtaacaagttcaaagcgcgtgtgatggtgtccagaaaacctcccgacggtgctgcagttggggatacttatgatcacaagcaggatattttgaaatatgagtggttcgagtttactttgccagaaggcaacttttcagttactatgactattgatttgatgaacaatgccatcatagataattacttgaaagtgggtagacagaatggagtgcttgaaagtgacattggtgttaagttcgacaccaggaacttcaagctgggatgggatcccgaaaccaagttgatcatgcctggagtgtatacgtatgaagccttccatcctgacattgtcttactgcctggctgcggagtggattttaccgagagtcgtttgagcaaccttcttggtatcagaaaaaaacagccatttcaagagggttttaagattttgtatgaagatttagaaggtggtaatattccggccctcttggatgtagatgcctatgagaacagtaagaaagaacaaaaagccaaaatagaagctgctacagctgctgcagaagctaaggcaaacatagttgccagcgactctacaagggttgctaacgctggagaggtcagaggagacaattttgcgccaacacctgttccgactgcagaatcattattggccgatgtgtctgaaggaacggacgtgaaactcactattcaacctgtagaaaaagatagtaagaatagaagctataatgtgttggaagacaaaatcaacacagcctatcgcagttggtatctttcgtacaattatggcgatcccgaaaaaggagtgcgttcctggacattgctcaccacctcagatgtcacctgcggagcagagcaggtctactggtcgcttccagacatgatgaaggatcctgtcactttccgctccactagacaagtcagtaactaccctgtggtgggtgcagagcttatgcccgtcttctcaaagagcttctacaacgaacaagctgtgtactcccagcagctccgccagtccacctcgcttacgcacgtcttcaaccgctttcctgagaaccagattttaatccgtccgccggcgcccaccattaccaccgtcagtgaaaacgttcctgctctcacagatcacgggaccctgccgttgcgcagcagtatccggggagtccaacgtgtgaccgttactgacgccagacgccgcacctgtccctacgtgtacaaggcactgggcatagtcgcaccgcgcgtcctttcaagccgcactttctaaaaaaaaaaaaaatgtccattcttatctcgcccagtaataacaccggttggggtctgcgcgctccaagcaagatgtacggaggcgcacgcaaacgttctacccaacatcctgtccgtgttcgcggacattttcgcgctccatggggcgccctcaagggccgcactcgcgttcgaaccaccgtcgatgatgtaatcgatcaggtggttgccgacgcccgtaattatactcctactgcgcctacatctactgtggatgcagttattgacagtgtagtggctgacgctcgcaactatgctcgacgtaagagccggcgaaggcgcattgccagacgccaccgagctaccactgccatgcgagccgcaagagctctgctacgaagagctagacgcgtggggcgaagagccatgcttagggcggccagacgtgcagcttcgggcgccagcgccggcaggtcccgcaggcaagcagccgctgtcgcagcggcgactattgccgacatggcccaatcgcgaagaggcaatgtatactgggtgcgtgacgctgccaccggtcaacgtgtacccgtgcgcacccgtccccctcgcacttagaagatactgagcagtctccgatgttgtgtcccagcggcgaggatgtccaagcgcaaatacaaggaagaaatgctgcaggttatcgcacctgaagtctacggccaaccgttgaaggatgaaaaaaaaccccgcaaaatcaagcgggttaaaaaggacaaaaaagaagaggaagatggcgatgatgggctggcggagtttgtgcgcgagtttgccccacggcgacgcgtgcaatggcgtgggcgcaaagttcgacatgtgttgagacctggaacttcggtggtctttacacccggcgagcgttcaagcgctacttttaagcgttcctatgatgaggtgtacggggatgatgatattcttgagcaggcggctgaccgattaggcgagtttgcttatggcaagcgtagtagaataacttccaaggatgagacagtgtcgatacccttggatcatggaaatcccacccctagtcttaaaccggtcactttgcagcaagtgttacccgtaactccgcgaacaggtgttaaacgcgaaggtgaagatttgtatcccactatgcaactgatggtacccaaacgccagaagttggaggacgttttggagaaagtaaaagtggatccagatattcaacctgaggttaaagtgagacccattaagcaggtagcgcctggtctgggggtacaaactgtagacattaagattcccactgaaagtatggaagtgcaaactgaacccgcaaagcctactgccacctccactgaagtgcaaacggatccatggatgcccatgcctattacaactgacgccgccggtcccactcgaagatcccgacgaaagtacggtccagcaagtctgttgatgcccaattatgttgtacacccatctattattcctactcctggttaccgaggcactcgctactatcgcagccgaaacagtacctcccgccgtcgccgcaagacacctgcaaatcgcagtcgtcgccgtagacgcacaagcaaaccgactcccggcgccctggtgcggcaagtgtaccgcaatggtagtgcggaacctttgacactgccgcgtgcgcgttaccatccgagtatcatcacttaatcaatgttgccgctgcctccttgcagatatggccctcacttgtcgccttcgcgttcccatcactggttaccgaggaagaaactcgcgccgtagaagagggatgttgggacgcggaatgcgacgctacaggcgacggcgtgctatccgcaagcaattgcggggtggttttttaccagccttaattccaattatcgctgctgcaattggcgcgataccaggcatagcttccgtggcggttcaggcctcgcaacgacattgacattggaaaaaaacgtataaataaaaaaaaaaaaatacaatggactctgacactcctggtcctgtgactatgttttcttagagatggaagacatcaatttttcatccttggctccgcgacacggcacgaagccgtacatgggcacctggagcgacatcggcacgagccaactgaacgggggcgccttcaattggagcagtatctggagcgggcttaaaaattttggctcaaccataaaaacatacgggaacaaagcttggaacagcagtacaggacaggcgcttagaaataaacttaaagaccagaacttccaacaaaaagtagtcgatgggatagcttccggcatcaatggagtggtagatttggctaaccaggctgtgcagaaaaagataaacagtcgtttggacccgccgccagcaaccccaggtgaaatgcaagtggaggaagaaattcctccgccagaaaaacgaggcgacaagcgtccgcgtcccgatttggaagagacgctggtgacgcgcgtagatgaaccgccttcttatgaggaagcaacgaagcttggaatgcccaccactagaccgatagccccaatggccaccggggtgatgaaaccttctcagttgcatcgacccgtcaccttggatttgccccctccccctgctgctactgctgtacccgcttctaagcctgtcgctgccccgaaaccagtcgccgtagccaggtcacgtcccgggggcgctcctcgtccaaatgcgcactggcaaaatactctgaacagcatcgtgggtctaggcgtgcaaagtgtaaaacgccgtcgctgcttttaattaaatatggagtagcgcttaacttgcctatctgtgtatatgtgtcattacacgccgtcacagcagcagaggaaaaaaggaagaggtcgtgcgtcgacgctgagttactttcaagatggccaccccatcgatgctgccccaatgggcatacatgcacatcgccggacaggatgcttcggagtacctgagtccgggtctggtgcagttcgcccgcgccacagacacctacttcaatctgggaaataagtttagaaatcccaccgtagcgccgacccacgatgtgaccaccgaccgtagccagcggctcatgttgcgcttcgtgcccgttgaccgggaggacaatacatactcttacaaagtgcggtacaccctggccgtgggcgacaacagagtgctggatatggccagcacgttctttgacattaggggtgtgttggacagaggtcccagtttcaaaccctattctggtacggcttacaactccctggctcctaaaggcgctccaaatacatctcagtggattgcagaaggtgtaaaaaatacaactggtgaggaacacgtaacagaagaggaaaccaatactactacttacacttttggcaatgctcctgtaaaagctgaagctgaaattacaaaagaaggactcccagtaggtttggaagtttcagatgaagaaagtaaaccgatttatgctgataaaacatatcagccagaacctcagctgggagatgaaacttggactgaccttgatggaaaaaccgaaaagtatggaggcagggctctcaaacccgatactaagatgaaaccatgctacgggtcctttgccaaacctactaatgtgaaaggcggtcaggcaaaacaaaaaacaacggagcagccaaatcagaaagtcgaatatgatatcgacatggagttttttgatgcggcatcgcagaaaacaaacttaagtcctaaaattgtcatgtatgcagaaaatgtaaatttggaaactccagacactcatgtagtgtacaaacctggaacagaagacacaagttccgaagctaatttgggacaacaatctatgcccaacagacccaactacattggcttcagagataactttattggacttatgtactataacagtactggtaacatgggggtgctggctggtcaagcgtctcagttaaatgcagtggttgacttgcaggacagaaacacagaactttcttaccaactcttgcttgactctctgggcgacagaaccagatactttagcatgtggaatcaggctgtggacagttatgatcctgatgtacgtgttattgaaaatcatggtgtggaagatgaacttcccaactactgttttccactggacggcataggtgttccaacaaccagttacaaatcaatagttccaaatggagacaatgcgcctaattggaaggaacctgaagtaaatggaacaagtgagatcggacagggtaatttgtttgccatggaaattaaccttcaagccaatctatggcgaagtttcctttattccaatgtggctctatatctcccagactcgtacaaatacaccccgtccaatgtcactcttccagaaaacaaaaacacctacgactacatgaacgggcgggtggtgccgccatctctagtagacacctatgtgaacattggtgccaggtggtctctggatgccatggacaatgtcaacccattcaaccaccaccgtaacgctggcttgcgttaccgatccatgcttctgggtaacggacgttatgtgcctttccacatacaagtgcctcaaaaattcttcgctgttaaaaacctgctgcttctcccaggctcctacacttatgagtggaactttaggaaggatgtgaacatggttctacagagttccctcggtaacgacctgcgggtagatggcgccagcatcagtttcacgagcatcaacctctatgctacttttttccccatggctcacaacaccgcttccacccttgaagccatgctgcggaatgacaccaatgatcagtcattcaacgactacctatctgcagctaacatgctctaccccattcctgccaatgcaaccaatattcccatttccattccttctcgcaactgggcggctttcagaggctggtcatttaccagactgaaaaccaaagaaactccctctttggggtctggatttgacccctactttgtctattctggttctattccctacctggatggtaccttctacctgaaccacacttttaagaaggtttccatcatgtttgactcttcagtgagctggcctggaaatgacaggttactatctcctaacgaatttgaaataaagcgcactgtggatggcgaaggctacaacgtagcccaatgcaacatgaccaaagactggttcttggtacagatgctcgccaactacaacatcggctatcagggcttctacattccagaaggatacaaagatcgcatgtattcatttttcagaaacttccagcccatgagcaggcaggtggttgatgaggtcaattacaaagacttcaaggccgtcgccataccctaccaacacaacaactctggctttgtgggttacatggctccgaccatgcgccaaggtcaaccctatcccgctaactatccctatccactcattggaacaactgccgtaaatagtgttacgcagaaaaagttcttgtgtgacagaaccatgtggcgcataccgttctcgagcaacttcatgtctatgggggcccttacagacttgggacagaatatgctctatgccaactcagctcatgctctggacatgacctttgaggtggatcccatggatgagcccaccctgctttatcttctcttcgaagttttcgacgtggtcagagtgcatcagccacaccgcggcatcatcgaggcagtctacctgcgtacaccgttctcggccggtaacgctaccacgtaagaagcttcttgcttcttgcaaatagcagctgcaaccatggcctgcggatcccaaaacggctccagcgagcaagagctcagagccattgtccaagacctgggttgcggaccctattttttgggaacctacgataagcgcttcccggggttcatggcccccgataagctcgcctgtgccattgtaaatacggccggacgtgagacggggggagagcactggttggctttcggttggaacccacgttctaacacctgctacctttttgatccttttggattctcggatgatcgtctcaaacagatttaccagtttgaatatgagggtctcctgcgccgcagcgctcttgctaccaaggaccgctgtattacgctggaaaaatctacccagaccgtgcagggtccccgttctgccgcctgcggacttttctgctgcatgttccttcacgcctttgtgcactggcctgaccgtcccatggacggaaaccccaccatgaaattgctaactggagtgccaaacaacatgcttcattctcctaaagtccagcccaccctgtgtgacaatcaaaaagcactctaccattttcttaatacccattcgccttattttcgctcccatcgtacacacatcgaaagggccactgcgttcgaccgtatggatgttcaataatgactcatgtaaacaacgtgttcaataaacatcactttatttttttacatgtatcaaggctctgcattacttatttatttacaagtcgaatgggttctgacgagaatcagaatgacccgcaggcagtgatacgttgcggaactgatacttgggttgccacttgaattcgggaatcaccaacttgggaaccggtatatcgggcaggatgtcactccacagctttctggtcagctgcaaagctccaagcaggtcaggagccgaaatcttgaaatcacaattaggaccagtgctttgagcgcgagagttgcggtacaccggattgcagcactgaaacaccatcagcgacggatgtctcacgcttgccagcacggtgggatctgcaatcatgcccacatccagatcttcagcattggcaatgctgaacggggtcatcttgcaggtctgcctacccatggcgggcacccaattaggcttgtggttgcaatcgcagtgcagggggatcagtatcatcttggcctgatcctgtctgattcctggatacacggctctcatgaaagcatcatattgcttgaaagcctgctgggctttactaccctcggtataaaacatcccgcaggacctgctcgaaaactggttagctgcacagccggcatcattcacacagcagcgggcgtcattgttagctatttgcaccacacttctgccccagcggttttgggtgattttggttcgctcgggattctcctttaaggctcgttgtccgttctcgctggccacatccatctcgataatctgctccttctgaatcataatattgccatgcaggcacttcagcttgccctcataatcattgcagccatgaggccacaacgcacagcctgtacattcccaattatggtgggcgatctgagaaaaagaatgtatcattccctgcagaaatcttcccatcatcgtgctcagtgtcttgtgactagtgaaagttaactggatgcctcggtgctcctcgtttacgtactggtgacagatgcgcttgtattgttcgtgttgctcaggcattagtttaaaagaggttctaagttcgttatccagcctgtacttctccatcagcagacacatcacttccatgcctttctcccaagcagacaccaggggcaagctaatcggattcttaacagtgcaggcagcagctcctttagccagagggtcatctttagcgatcttctcaatgcttcttttgccatccttctcaacgatgcgcacgggcgggtagctgaaacccactgctacaagttgcgcctcttctctttcttcttcgctgtcttgactgatgtcttgcatggggatatgtttggtcttccttggcttctttttggggggtatcggaggaggaggactgtcgctccgttccggagacagggaggattgtgacgtttcgctcaccattaccaactgactgtcggtagaagaacctgaccccacacggcgacaggtgtttctcttcgggggcagaggtggaggcgattgcgaagggctgcggtccgacctggaaggcggatgactggcagaaccccttccgcgttcgggggtgtgctccctgtggcggtcgcttaactgatttccttcgcggctggccattgtgttctcctaggcagagaaacaacagacatggaaactcagccattgctgtcaacatcgccacgagtgccatcacatctcgtcctcagcgacgaggaaaaggagcagagcttaagcattccaccgcccagtcctgccaccacctctaccctagaagataaggaggtcgacgcatctcatgacatgcagaataaaaaagcgaaagagtctgagacagacatcgagcaagacccgggctatgtgacaccggtggaacacgaggaagagttgaaacgctttctagagagagaggatgaaaactgcccaaaacaacgagcagataactatcaccaagatgctggaaatagggatcagaacaccgactacctcatagggcttgacggggaagacgcgctccttaaacatctagcaagacagtcgctcatagtcaaggatgcattattggacagaactgaagtgcccatcagtgtggaagagctcagccgcgcctacgagcttaacctcttttcacctcgtactccccccaaacgtcagccaaacggcacctgcgagccaaatcctcgcttaaacttttatccagcttttgctgtgccagaagtactggctacctatcacatcttttttaaaaatcaaaaaattccagtctcctgccgcgctaatcgcacccgcgccgatgccctactcaatctgggacctggttcacgcttacctgatatagcttccttggaagaggttccaaagatcttcgagggtctgggcaataatgagactcgggccgcaaatgctctgcaaaagggagaaaatggcatggatgagcatcacagcgttctggtggaattggaaggcgataatgccagactcgcagtactcaagcgaagcatcgaggtcacacacttcgcatatcccgctgtcaacctgccccctaaagtcatgacggcggtcatggaccagttactcattaagcgcgcaagtcccctttcagaagacatgcatgacccagatgcctgtgatgagggtaaaccagtggtcagtgatgagcagctaacccgatggctgggcaccgactctcccagggatttggaagagcgtcgcaagcttatgatggccgtggtgctggttaccgtagaactagagtgtctccgacgtttctttaccgattcagaaaccttgcgcaaactcgaagagaatctgcactacacttttagacacggctttgtgcggcaggcatgcaagatatctaacgtggaactcaccaacctggtttcctacatgggtattctgcatgagaatcgcctaggacaaagcgtgctgcacagcaccctgaagggggaagcccgccgtgattacatccgcgattgtgtctatctgtacctgtgccacacgtggcaaaccggcatgggtgtatggcagcaatgtttagaagaacagaacttgaaagagcttgacaagctcttacagaaatctcttaaggttctgtggacagggttcgacgagcgcaccgtcgcttccgacctggcagacctcatcttcccagagcgtctcagggttactttgcgaaacggattgcctgactttatgagccagagcatgcttaacaattttcgctctttcatcctggaacgctccggtatcctgcccgccacctgctgcgcactgccctccgactttgtgcctctcacctaccgcgagtgccccccgccgctatggagtcactgctacctgttccgtctggccaactatctctcctaccactcggatgtgatcgaggatgtgagcggagacggcttgctggagtgtcactgccgctgcaatctgtgcacgccccaccggtccctagcttgcaacccccagttgatgagcgaaacccagataataggcacctttgaattgcaaggccccagcagccaaggcgatgggtcttctcctgggcaaagtttaaaactgaccccgggactgtggacctccgcctacttgcgcaagtttgctccggaagattaccacccctatgaaatcaagttctatgaggaccaatcacagcctccaaaggccgaactttcggcctgcgtcatcacccagggggcaattctggcccaattgcaagccatccaaaaatcccgccaagaatttctactgaaaaagggtaagggggtctaccttgacccccagaccggcgaggaactcaacacaaggttccctcaggatgtcccaacgacgagaaaacaagaagttgaaggtgcagccgccgcccccagaagatatggaggaagattgggacagtcaggcagaggaggcggaggaggacagtctggaggacagtctggaggaagacagtttggaggaggaaaacgaggaggcagaggaggtggaagaagtaaccgccgacaaacagttatcctcggctgcggagacaagcaacagcgctaccatctccgctccgagtcgaggaacccggcggcgtcccagcagtagatgggacgagaccggacgcttcccgaacccaaccagcgcttccaagaccggtaagaaggatcggcagggatacaagtcctggcgggggcataagaatgccatcatctcctgcttgcatgagtgcgggggcaacatatccttcacgcggcgctacttgctattccaccatggggtgaactttccgcgcaatgttttgcattactaccgtcacctccacagcccctactatagccagcaaatcccggcagtctcgacagataaagacagcggcggcgacctccaacagaaaaccagcagcggcagttagaaaatacacaacaagtgcagcaacaggaggattaaagattacagccaacgagccagcgcaaacccgagagttaagaaatcggatctttccaaccctgtatgccatcttccagcagagtcggggtcaagagcaggaactgaaaataaaaaaccgatctctgcgttcgctcaccagaagttgtttgtatcacaagagcgaagatcaacttcagcgcactctcgaggacgccgaggctctcttcaacaagtactgcgcgctgactcttaaagagtaggcagcgaccgcgcttattcaaaaaaggcgggaattacatcatcctcgacatgagtaaagaaattcccacgccttacatgtggagttatcaaccccaaatgggattggcggcaggcgcctcccaggactactccacccgcatgaattggctcagcgccgggccttctatgatttctcgagttaatgatatacgcgcctaccgaaaccaaatacttttggaacagtcagctcttaccaccacgccccgccaacaccttaatcccagaaattggcccgccgccctagtgtaccaggaaagtcccgctcccaccactgtattacttcctcgagacgcccaggccgaagtccaaatgactaatgcaggtgcgcagttagctggcggctccaccctatgtcgtcacaggcctcggcataatataaaacgcctgatgatcagaggccgaggtatccagctcaacgacgagtcggtgagctctccgcttggtctacgaccagacggaatctttcagattgccggctgcgggagatcttccttcacccctcgtcaggctgttctgactttggaaagttcgtcttcgcaaccccgctcgggcggaatcgggaccgttcaatttgtggaggagtttactccctctgtctacttcaaccccttctccggatctcctgggcattacccggacgagttcataccgaacttcgacgcgattagcgagtcagtggacggctacgattgatgtctggtgacgcggctgagctatctcggctgcgacatctagaccactgccgccgctttcgctgctttgcccgggaactcattgagttcatctacttcgaactccccaaggatcaccctcaaggtccggcccacggagtgcggatttctatcgaaggcaaaatagactctcgcctgcaacgaattttctcccagcggcccgtgctgatcgagcgagaccagggaaacaccacggtttccatctactgcatttgtaatcaccccggattgcatgaaagcctttgctgtcttatgtgtactgagtttaataaaaactgaattaagactctcctacggactgccgcttcttcaacccggattttacaaccagaagaacgaaacttttcctgtcgtccaggactctgttaacttcacctttcctactcacaaactagaagctcaacgactacaccgcttttccagaagcattttccctactaatactactttcaaaaccggaggtgagctccaaggtcttcctacagaaaacccttgggtggaagcgggccttgtagtgctaggaattcttgcgggtgggcttgtgattattctttgctacctatacacaccttgcttcactttcttagtggtgttgtggtattggtttaaaaaatggggcccatactagtcttgcttgttttactttcgcttttggaaccgggttctgccaattacgatccatgtctagacttcgacccagaaaactgcacacttacttttgcacccgacacaagccgcatctgtggagttcatcgcctctcttacgaacttggcccccaacgacaaaaatttacctgcatggtgggaatcaaccccatagttatcacccagcaaagtggagatactaagggttgcattcactgctcctgcgattccatcgagtgcacctacaccctgctgaagaccctatgcggcctaagagacctgctaccaatgaattaaaaaatgattaataaaaaatcacttacttgaaatcagcaataaggtctctgttgaaattttctcccagcagcacctcacttccctcttcccaactctggtattctaaaccccgttcagcggcatactttctccatactttaaaggggatgtcaaattttagctcctctcctgtacccacaatcttcatgtctttcttcccagatgaccaagagagtccggctcagtgactccttcaaccctgtctacccctatgaagatgaaagcacctcccaacacccctttataaacccagggtttatttccccaaatggcttcacacaaagcccaaacggagttcttactttaaaatgtttaaccccactaacaaccacaggcggatctctacagctaaaagtgggagggggacttacagtggatgacaccaacggttttttgaaagaaaacataagtgccaccacaccactcgttaagactggtcactctataggtttaccactaggagccggattgggaacgaatgaaaataaactttgtatcaaattaggacaaggacttacattcaattcaaacaacatttgcattgatgacaatattaacaccttatggacaggagtcaaccccaccgaagccaactgtcaaatcatgaactccagtgaatctaatgattgcaaattaattctaacactagttaaaactggagcactagtcactgcatttgtttatgttataggagtatctaacaattttaatatgctaactacacacagaaatataaattttactgcagagctgtttttcgattctactggtaatttactaactagactctcatccctcaaaactccacttaatcataaatcaggacaaaacatggctactggtgccattactaatgctaaaggtttcatgcccagcacgactgcctatcctttcaatgataattctagagaaaaagaaaactacatttacggaacttgttactacacagctagtgatcgcactgcttttcccattgacatatctgtcatgcttaaccgaagagcaataaatgacgagacatcatattgtattcgtataacttggtcctggaacacaggagatgccccagaggtgcaaacctctgctacaaccctagtcacctccccatttaccttttactacatcagagaagacgactgacaaataaagtttgcgatcgccaggcccaccatgtgtcaccagcagttggtcatctcttggttttccctggtttttctggcatctcccctcgtggccatatgggaactgaagaaagatgtttatgtcgtagaattggattggtatccggatgcccctggagaaatggtggtcctcacctgtgacacccctgaagaagatggtatcacctggaccttggaccagagcagtgaggtcttaggctctggcaaaaccctgaccatccaagtcaaagagtttggagatgctggccagtacacctgtcacaaaggaggcgaggttctaagccattcgctcctgctgcttcacaaaaaggaagatggaatttggtccactgatattttaaaggaccagaaagaacccaaaaataagacctttctaagatgcgaggccaagaattattctggacgtttcacctgctggtggctgacgacaatcagtactgatttgacattcagtgtcaaaagcagcagaggctcttctgacccccaaggggtgacgtgcggagctgctacactctctgcagagagagtcagaggggacaacaaggagtatgagtactcagtggagtgccaggaggacagtgcctgcccagctgctgaggagagtctgcccattgaggtcatggtggatgccgttcacaagctcaagtatgaaaactacaccagcagcttcttcatcagggacatcatcaaacctgacccacccaagaacttgcagctgaagccattaaagaattctcggcaggtggaggtcagctgggagtaccctgacacctggagtactccacattcctacttctccctgacattctgcgttcaggtccagggcaagagcaagagagaaaagaaagatagagtcttcacggacaagacctcagccacggtcatctgccgcaaaaatgccagcattagcgtgcgggcccaggaccgctactatagctcatcttggagcgaatgggcatctgtgccctgcagtggagggggcggcagcgggggaggcggcagcggcggcgggggatcgagaaacctccccgtggccactccagacccaggaatgttcccatgccttcaccactcccaaaacctgctgagggccgtcagcaacatgctccagaaggccagacaaactctagaattttacccttgcacttctgaagagattgatcatgaagatatcacaaaagataaaaccagcacagtggaggcctgtttaccattggaattaaccaagaatgagagttgcctaaattccagagagacctctttcataactaatgggagttgcctggcctccagaaagacctcttttatgatggccctgtgccttagtagtatttatgaagacttgaagatgtaccaggtggagttcaagaccatgaatgcaaagcttctgatggatcctaagaggcagatctttctagatcaaaacatgctggcagttattgatgagctgatgcaggccctgaatttcaacagtgagactgtgccacaaaaatcctcccttgaagaaccggatttttataaaactaaaatcaagctctgcatacttcttcatgctttcagaattcgggcagtgactattgatagagtgatgagctatctgaatgcttccggaagcggagctactaacttcagcctgctgaagcaggctggagacgtggaggagaaccctggacctaagaaaagtggtgttcttttcctcttgggcatcatcttgctggttctgattggagtgcaaggaaccccagtagtgagaaagggtcgctgttcctgcatcagcaccaaccaagggactatccacctacaatccttgaaagaccttaaacaatttgccccaagcccttcctgcgagaaaattgaaatcattgctacactgaagaatggagttcaaacatgtctaaacccagattcagcagatgtgaaggaactgattaaaaagtgggagaaacaggtcagccaaaagaaaaagcaaaagaatgggaaaaaacatcaaaaaaagaaagttctgaaagttcgaaaatctcaacgttctcgtcaaaagaagactacaggaagcggacagtgtactaattatgctctcttgaaattggctggagatgttgagagcaaccctggacctgactggacctggcgcatcctgttcttggtggcagctgctacgggagctcattccaactgggtgaatgtaataagtgatttgaaaaaaattgaagatcttattcaatctatgcatattgatgctactttatatacggaaagtgatgttcaccccagttgcaaagtaacagcaatgaagtgctttctcttggagttacaagttatttcacttgagtccggagatgcaagtattcatgatacagtagaaaatctgatcatcctagcaaacaacagtttgtcttctaatgggaatgtaacagaatctggatgcaaagaatgtgaggaactggaggaaaaaaatattaaagaatttttgcagagttttgtacatattgtccaaatgttcatcaacacttctggaagcggagagggcagaggaagtctgctaacatgcggtgacgtcgaggagaatcctggacctgccttgacctttgctttactggtggccctcctggtgctcagctgcaagtcaagctgctctgtgggctgtgatctgcctcaaacccacagcctgggtagcaggaggaccttgatgctcctggcacagatgaggagaatctctcttttctcctgcttgaaggacagacatgactttggatttccccaggaggagtttggcaaccagttccaaaaggctgaaaccatccctgtcctccatgagatgatccagcagatcttcaatctcttcagcacaaaggactcatctgctgcttgggatgagaccctcctagacaaattctacactgaactctaccagcagctgaatgacctggaagcctgtgtgatacagggggtgggggtgacagagactcccctgatgaaggaggactccattctggctgtgaggaaatacttccaaagaatcactctctatctgaaagagaagaaatacagcccttgtgcctgggaggttgtcagagcagaaatcatgagatctttttctttgtcaacaaacttgcaagaaagtttaagaagtaaggaaggaagcggagtgaaacagactttgaattttgaccttctcaagttggcgggagacgtggagtccaaccctggacctgctcagtcactggctctgagcctccttatcctggttctggcctttggcatccccaggacccaaggcagtgatggaggggctcaggactgttgcctcaagtacagccaaaggaagattcccgccaaggttgtccgcagctaccggaagcaggaaccaagcttaggctgctccatcccagctatcctgttcttgccccgcaagcgctctcaggcagagctatgtgcagacccaaaggagctctgggtgcagcagctgatgcagcatctggacaagacaccatccccacagaaaccagcccagggctgcaggaaggacaggggggcctccaagactggcaagaaaggaaagggctccaaaggctgcaagaggactgagcggtcacagacccctaaagggccataagctagcttgactgactgagatacagcgtaccttcagctcacagacatgataagatacattgatgagtttggacaaaccacaactagaatgcagtgaaaaaaatgctttatttgtgaaatttgtgatgctattgctttatttgtaaccattataagctgcaataaacaagttaacaacaacaattgcattcattttatgtttcaggttcagggggaggtgtgggaggttttttaaagcaagtaaaacctctacaaatgtggtagtcgtcagctatcctgcaggaacttgtttatttgaaaatcaattcacaaaatccgagtagttattttgcctcccccttcccatttaacagaatacaccaatctctccccacgcacagctttaaacatttggataccattagatatagacatggttttagattccacattccaaacagtttcagagcgagccaatctggggtcagtgatagataaaaatccatcgggatagtcttttaaagcgctttcacagtccaactgctgcggatgcgactccggagtctggatcacggtcatctggaagaagaacgatgggaatcataatccgaaaacggtatcggacgattgtgtctcatcaaacccacaagcagccgctgtctgcgtcgctccgtgcgactgctgtttatgggatcagggtccacagtgtcctgaagcatgattttaatagcccttaacatcaactttctggtgcgatgcgcgcagcaacgcattctgatttcactcaaatctttgcagtaggtacaacacattattacaatattgtttaataaaccataattaaaagcgctccagccaaaactcatatctgatataatcgcccctgcatgaccatcataccaaagtttaatataaattaaatgacgttccctcaaaaacacactacccacatacatgatctcttttggcatgtgcatattaacaatctgtctgtaccatggacaacgttggttaatcatgcaacccaatataaccttccggaaccacactgccaacaccgctcccccagccatgcattgaagtgaaccctgctgattacaatgacaatgaagaacccaattctctcgaccgtgaatcacttgagaatgaaaaatatctatagtggcacaacatagacataaatgcatgcatcttctcataatttttaactcctcaggatttagaaacatatcccagggaataggaagctcttgcagaacagtaaagctggcagaacaaggaagaccacgaacacaacttacactatgcatagtcatagtatcacaatctggcaacagcgggtggtcttcagtcatagaagctcgggtttcattttcctcacaacgtggtaactgggctctggtgtaagggtgatgtctggcgcatgatgtcgagcgtgcgcgcaaccttgtcataatggagttgcttcctgacattctcgtattttgtatagcaaaacgcggccctggcagaacacactcttcttcgccttctatcctgccgcttagcgtgttccgtgtgatagttcaagtacaaccacactcttaagttggtcaaaagaatgctggcttcagttgtaatcaaaactccatcgcatctaatcgttctgaggaaatcatccaagcaatgcaactggattgtgtttcaagcaggagaggagagggaagagacggaagaaccatgttaatttttattccaaacgatctcgcagtacttcaaattgtagatcgcgcagatggcatctctcgcccccactgtgttggtgaaaaagcacagctagatcaaaagaaatgcgattttcaaggtgctcaacggtggcttccagcaaagcctccacgcgcacatccaagaacaaaagaataccaaaagaaggagcattttctaactcctcaatcatcatattacattcctgcaccattcccagataattttcagctttccagccttgaattattcgtgtcagttcttgtggtaaatccaatccacacattacaaacaggtcccggagggcgccctccaccaccattcttaaacacaccctcataatgacaaaatatcttgctcctgtgtcacctgtagcgaattgagaatggcaacatcaattgacatgcccttggctctaagttcttctttaagttctagttgtaaaaactctctcatattatcaccaaactgcttagccagaagccccccgggaacaagagcaggggacgctacagtgcagtacaagcgcagacctccccaattggctccagcaaaaacaagattggaataagcatattgggaaccgccagtaatatcatcgaagttgctggaaatataatcaggcagagtttcttgtaaaaattgaataaaagaaaaatttgccaaaaaaacattcaaaacctctgggatgcaaatgcaataggttaccgcgctgcgctccaacattgttagttttgaattagtctgcaaaaataaaaaaaaaaacaagcgtcatatcatagtagcctgacgaacagatggataaatcagtctttccatcacaagacaagccacagggtctccagctcgaccctcgtaaaacctgtcatcatgattaaacaacagcaccgaaagttcctcgcggtgaccagcatgaataattcttgatgaagcatacaatccagacatgttagcatcagttaacgagaaaaaacagccaacatagcctttgggtataattatgcttaatcgtaagtatagcaaagccacccctcgcggatacaaagtaaaaggcacaggagaataaaaaatataattatttctctgctgctgttcaggcaacgtcgcccccggtccctctaaatacacatacaaagcctcatcagccatggcttaccagacaaagtacagcgggcacacaaagcacaagctctaaagtgactctccaacctctccacaatatatatatacacaagccctaaactgacgtaatgggagtaaagtgtaaaaaatcccgccaaacccaacacacaccccgaaactgcgtcaccagggaaaagtacagtttcacttccgcaatcccaacaggcgtaacttcctctttctcacggtacgtgatatcccactaacttgcaacgtcattttcccacggtcgcaccgccccttttagccgttaaccccacagccaatcaccacacgatccacactttttaaaatcacctcatttacatattggcaccattccatctataaggtatattatatagataga

SEQ ID NO: 86 - DNA, 36154 bp, Artificial Sequence
  Genome sequence of NG-724 virus
tctatctatataatataccttatagatggaatggtgccaatatgtaaatgaggtgattttaaaaagtgtggatcgtgtggtgattggctgtggggttaacggctaaaaggggcggtgcgaccgtgggaaaatgacgttttgtgggggtggagtttttttgcaagttgtcgcgggaaatgtgacgcataaaaaggcttttttctcacggaactacttagttttcccacggtatttaacaggaaatgaggtagttttgaccggatgcaagtgaaaattgttgattttcgcgcgaaaactgaatgaggaagtgtttttctgaataatgtggtatttatggcagggtggagtatttgttcagggccaggtagactttgacccattacgtggaggtttcgattaccgtgttttttacctgaatttccgcgtaccgtgtcaaagtcttctgtttttacgtaggtgtcagctgatcgctagggtatttatacctcagggtttgtgtcaagaggccactcttgagtgccagcgagaagagttttctcctctgcgccggcagtttaataataaaaaaatgagagatttgcgatttctgcctcaggaaataatctctgctgagactggaaatgaaatattggagcttgtggtgcacgccctgatgggagacgatccggagccacctgtgcagctttttgagcctcctacgcttcaggaactgtatgatttagaggtagagggatcggaggattctaatgaggaagctgtaaatggcttttttaccgattctatgcttttagctgctaatgaagggttagaattagatccgcctttggacacttttgatactccaggggtaattgtggaaagcggtacaggtgtaagaaaattacctgatttgagttccgtggactgtgatttgcactgctatgaagacgggtttcctccgagtgatgaggaggaccatgaaaaggagcagtccatgcagactgcagcgggtgagggagtgaaggctgccaatgttggttttcagttggattgcccggagcttcctggacatggctgtaagtcttgtgaatttcacaggaaaaatactggagtaaaggaactgttatgttcgctttgttatatgagaacgcactgccactttatttacagtaagtgtgtttaagttaaaatttaaaggaatatgctgtttttcacatgtatattgagtgtgagttttgtgcttcttattataggtcctgtgtctgatgctgatgaatcaccatctcctgattctactacctcacctcctgagattcaagcacctgttcctgtggacgtgcgcaagcccattcctgtgaagcttaagcctgggaaacgtccagcagtggaaaaacttgaggacttgttacagggtggggacggacctttggacttgagtacacggaaacgtccaagacaataagtgttccatatccgtgtttacttaaggtgacgtcaatatttgtgtgacagtgcaatgtaataaaaatatgttaactgttcactggtttttattgctttttgggcggggactcaggtatataagtagaagcagacctgtgtggttagctcataggagctggctttcatccatggaggtttgggccattttggaagaccttaggaagactaggcaactgttagagaacgcttcggacggagtctccggtttttggagattctggttcgctagtgaattagctagggtagtttttaggataaaacaggactataaacaagaatttgaaaagttgttggtagattgcccaggactttttgaagctcttaatttgggccatcaggttcactttaaagaaaaagttttatcagttttagacttttcaaccccaggtagaactgctgctgctgtggcttttcttacttttatattagataaatggatcccgcagactcatttcagcaggggatacgttttggatttcatagccacagcattgtggagaacatggaaggttcgcaagatgaggacaatcttaggttactggccagtgcagcctttgggtgtagcgggaatcctgaggcatccaccggtcatgccagcggttctggaggaggaacagcaagaggacaacccgagagccggcctggaccctccagtggaggaggcggagtagctgacttgtctcctgaactgcaacgggtgcttactggatctacgtccactggacgggataggggcgttaagagggagagggcatctagtggtactgatgctagatctgagttggctttaagtttaatgagtcgcagacgtcctgaaaccatttggtggcatgaggttcagaaagagggaagggatgaagtttctgtattgcaggagaaatattcactggaacaggtgaaaacatgttggttggagcctgaggatgattgggaggtggccattaaaaattatgccaagatagctttgaggcctgataaacagtataagattactagacggattaatatccggaatgcttgttacatatctggaaatggggctgaggtggtaatagatactcaagacaaggcagttattagatgctgcatgatggatatgtggcctggggtagtcggtatggaagcagtaacttttgtaaatgttaagtttaggggagatggttataatggaatagtgtttatggccaataccaaacttatattgcatggttgtagcttttttggtttcaacaatacctgtgtagatgcctggggacaggttagtgtacggggatgtagtttctatgcgtgttggattgccacagctggcagaaccaagagtcaattgtctctgaagaaatgcatatttcaaagatgtaacctgggcattctgaatgaaggcgaagcaagggtccgccactgcgcttctacagatactggatgttttattttgattaagggaaatgccagcgtaaagcataacatgatttgcggtgcttccgatgagaggccttatcaaatgctcacttgtgctggtgggcattgtaatatgctggctactgtgcatattgtttcccatcaacgcaaaaaatggcctgtttttgatcacaatgtgatgacgaagtgtaccatgcatgcaggtgggcgtagaggaatgtttatgccttaccagtgtaacatgaatcatgtgaaagtgttgttggaaccagatgccttttccagaatgagcctaacaggaatttttgacatgaacatgcaaatctggaagatcctgaggtatgatgatacgagatcgagggtacgcgcatgcgaatgcggaggcaagcatgccaggttccagccggtgtgtgtagatgtgactgaagatctcagaccggatcatttggttattgcccgcactggagcagagttcggatccagtggagaagaaactgactaaggtgagtattgggaaaactttggggtgggattttcagatggacagattgagtaaaaatttgttttttctgtcttgcagctgtcatgagtggaaacgcttcttttaaggggggagtcttcagcccttatctgacagggcgtctcccatcctgggcaggagttcgtcagaatgttatgggatctactgtggatggaagacccgtccaacccgccaattcttcaacgctgacctatgctactttaagttcttcacctttggacgcagctgcagctgccgccgccgcttctgttgccgctaacactgtgcttggaatgggttactatggaagcatcatggctaattccacttcctctaataacccttctaccctgactcaggacaagttacttgtccttttggcccagctggaggctttgacccaacgtctgggtgaactttctcagcaggtggtcgagttgcgagtacaaactgagtctgctgtcggcacggcaaagtctaaataaaaaaatcccagaatcaatgaataaataaacaagcttgttgttgatttaaaatcaagtgtttttatttcatttttcgcgcacggtatgccctagaccaccgatctctatcattgagaactcggtggattttttccaggatcctatagaggtgggattgaatgtttagatacatgggcattaggccgtctttggggtggagatagctccattgaagggattcatgctccggggtagtgttgtaaatcacccagtcataacaaggtcgcagtgcatggtgttgcacaatatcttttagaagtaggctgattgccacagataagcccttggtgtaggtgtttacaaaccggttgagctgggatgggtgcattcggggtgaaattatgtgcattttggattggatttttaagttggcaatattgccgccaagatcccgtcttgggttcatgttatgaaggaccaccaagacggtgtatccggtacatttaggaaatttatcgtgcagcttggatggaaaagcgtggaaaaatttggagacacccttgtgtcctccaagattttccatgcactcatccatgataatagcaatggggccgtgggcagcggcgcgggcaaacacgttccgtgggtctgacacatcatagttatgttcctgagttaaatcatcataagccattttaatgaatttggggcggagagtaccagattggggtatgaatgttccttcgggccccggagcatagttcccctcacagatttgcatttcccaagctttcagttccgagggtggaatcatgtccacctggggggctatgaaaaacaccgtttctggggcgggggtgattaattgtgatgatagcaaatttctgagcaattgagatttgccacatccggtggggccataaatgattccgattacgggttgcaggtggtagtttagggaacggcaactgccgtcttctcgaagcaagggggccacctcgttcatcatttcccttacatgcatattttcccgcaccaaatccattaggaggcgctctcctcctagtgatagaagttcttgtagtgaggaaaagtttttcagcggtttcagaccgtcagccatgggcattttggagagagtttgctgcaaaagttctagtctgttccacagttcagtgatgtgttctatggcatctcgatccagcagacctcctcgtttcgcgggtttggacggctcctggaatagggtatgagacgatgggcgtccagcgctgccagggttcggtccttccagggtctcagtgttcgagtcagggttgtttccgtcacagtgaaggggtgtgcgcctgcttgggcgcttgccagggtgcgcttcagactcatcctgctggtcgaaaacttctgtcgcttggcgccctgtatgtcggccaagtagcagtttaccatgagttcgtagttgagcgcctcggctgcgtggcctttggcgcggagcttacctttggaagttttcttgcataccgggcagtataggcatttcagcgcatacaacttgggcgcaaggaaaacggattctggggagtatgcatctgcgccgcaggaggcgcaaacagtttcacattccaccagccaggttaaatccggttcattggggtcaaaaacaagttttccgccatattttttgatgcgtttcttacctttggtctccatgagttcgtgtcctcgttgagtgacaaacaggctgtccgtgtccccgtagactgattttacaggcctcttctccagtggagtgcctcggtcttcttcgtacaggaactctgaccactctgatacaaaggcgcgcgtccaggccagcacaaaggaggctatgtgggaggggtagcgatcgttgtcaaccagggggtccaccttttccaaagtatgcaaacacatgtcaccctcttcaacatccaggaatgtgattggcttgtaggtgtatttcacgtgacctggggtccccgctgggggggtataaaagggggcggttctttgctcttcctcactgtcttccggatcgctgtccaggaacgtcagctgttggggtaggtattccctctcgaaggcgggcatgacctctgcactcaggttgtcagtttctaagaacgaggaggatttgatattgacagtgccggttgagatgcctttcatgaggttttcgtccatctggtcagaaaacacaatttttttattgtcaagtttggtggcaaatgatccatacagggcgttggataaaagtttggcaatggatcgcatggtttggttcttttccttgtccgcgcgctctttggcggcgatgttgagttggacatactcgcgtgccaggcacttccattcggggaagatagttgttaattcatctggcacgattctcacttgccaccctcgattatgcaaggtaattaaatccacactggtggccacctcgcctcgaaggggttcattggtccaacagagcctacctcctttcctagaacagaaagggggaagtgggtctagcataagttcatcgggagggtctgcatccatggtaaagattcccggaagtaaatccttatcaaaatagctgatgggagtggggtcatctaaggccatttgccattctcgagctgccagtgcgcgctcatatgggttaaggggactgccccatggcatgggatgggtgagtgcagaggcatacatgccacagatgtcatagacgtagatgggatcctcaaagatgcctatgtaggttggatagcatcgcccccctctgatacttgctcgcacatagtcatatagttcatgtgatggcgctagcagccccggacccaagttggtgcgattgggtttttctgttctgtagacgatctggcgaaagatggcgtgagaattggaagagatggtgggtctttgaaaaatgttgaaatgggcatgaggtagacctacagagtctctgacaaagtgggcataagattcttgaagcttggttaccagttcggcggtgacaagtacgtctagggcgcagtagtcaagtgtttcttgaatgatgtcataacctggttggtttttcttttcccacagttcgcggttgagaaggtattcttcgcgatccttccagtactcttctagcggaaacccgtctttgtctgcacggtaagatcctagcatgtagaactgattaactgccttgtaagggcagcagcccttctctacgggtagagagtatgcttgagcagcttttcgtagcgaagcgtgagtaagggcaaaggtgtctctgaccatgactttgaggaattggtatttgaagtcgatgtcgtcacaggctccctgttcccagagttggaagtctacccgtttcttgtaggcggggttgggcaaagcgaaagtaacatcattgaagagaatcttgccggccctgggcatgaaattgcgagtgatgcgaaaaggctgtggtacttccgctcggttattgataacctgggcagctaggacgatctcgtcgaaaccgttgatgttgtgtcctacgatgtataattctatgaaacgcggcgtgcctctgacgtgaggtagcttactgagctcatcaaaggttaggtctgtggggtcagataaggcgtagtgttcgagagcccattcgtgcaggtgaggattcgctttaaggaaggaggaccagaggtccactgccagtgctgtttgtaactggtcccggtactgacgaaaatgccgtccgactgccattttttctggggtgacgcaatagaaggtttgggggtcctgccgccagcgatcccacttgagttttatggcgaggtcataggcgatgttgacgagccgctggtctccagagagtttcatgaccagcatgaaggggattagctgcttgccaaaggaccccatccaggtgtaggtttccacatcgtaggtgagaaagagcctttctgtgcgaggatgagagccaatcgggaagaactggatctcctgccaccagttggaggaatggctgttgatgtgatggaagtagaactccctgcgacgcgccgagcattcatgcttgtgcttgtacagacggccgcagtagtcgcagcgttgcacgggttgtatctcgtgaatgagttgtacctggcttcccttgacgagaaatttcagtgggaagccgaggcctggcgattgtatctcgtgctttactatgttgtctgcatcggcctgttcatcttctgtctcgatggtggtcatgctgacgagccctcgcgggaggcaagtccagacctcggcgcggcaggggcggagctcgaggacgagagcgcgcaggctggagctgtccagggtcctgagacgctgcggactcaggttagtaggcagtgtcaggagattaacttgcatgatcttttggagggcgtgcgggaggttcagatagtacttgatctcaacgggtccgttggtggagatgtcgatggcttgcagggttccgtgtcccttgggcgctaccaccgtgcccttgtttttcattttggacggcggtggctctgttgcttcttgcatgtttagaagcggtgtcgagggcgcgcaccgggcggcaggggcggctcgggacccggcggcatggctggcagtggtacgtcggcgccgcgcgcgggtaggttctggtactgcgccctgagaagactcgcatgcgcgacgacgcggcggttgacatcctggatctgacgcctctgggtgaaagctaccggccccgtgagcttgaacctgaaagagagttcaacagaatcaatctcggtatcgttgacggcggcttgcctaaggatttcttgcacgtcaccagagttgtcctggtaggcgatctccgccatgaactgctcgatctcttcctcttgaagatctccgcggcccgctctctcgacggtggccgcgaggtcgttggagatgcgcccaatgagttgagagaatgcattcatgcccgcctcgttccagacgcggctgtagaccacggcccccacgggatctctcgcgcgcatgaccacctgggcgaggttgagctccacgtggcgggtgaagaccgcatagttgcataggcgctggaaaaggtagttgagtgtggtggcgatgtgctcggtgacgaagaaatacatgatccatcgtctcagcggcatctcgctgacatcgcccagagcttccaagcgctccatggcctcgtagaagtccacggcaaaattaaaaaactgggagtttcgcgcggacacggtcaactcctcttccagaagacggataagttcggcgatggtggtgcgcacctcgcgctcgaaagcccctgggatttcttcctcaatctcttcttcttccactaacatctcttcctcttcaggtggggctgcaggaggagggggaacgcggcgacgccggcggcgcacgggcagacggtcgatgaatctttcaatgacctctccgcggcggcggcgcatggtttcagtgacggcgcggccgttctcgcgcggtcgcagagtaaaaacaccgccgcgcatctccttaaagtggtgactgggaggttctccgtttgggagggagagggcgctgattatacattttattaattggcccgtagggactgcacgcagagatctgatcgtgtcaagatccacgggatctgaaaacctttcgacgaaagcgtctaaccagtcacagtcacaaggtaggctgagtacggcttcttgtgggcgggggtggttatgtgttcggtctgggtcttctgtttcttcttcatctcgggaaggtgagacgatgctgctggtgatgaaattaaagtaggcagttctaagacggcggatggtggcgaggagcaccaggtctttgggtccggcttgctggatacgcaggcgattggccattccccaagcattatcctgacatctagcaagatctttgtagtagtcttgcatgagccgttctacgggcacttcttcctcacccgttctgccatgcatacgtgtgagtccaaatccgcgcattggttgtaccagtgccaagtcagctacgactctttcggcgaggatggcttgctgtacttgggtaagggtggcttgaaagtcatcaaaatccacaaagcggtggtaagctcctgtattaatggtgtaagcacagttggccatgactgaccagttaactgtctggtgaccagggcgcacgagctcggtgtatttaaggcgcgaataggcgcgggtgtcaaagatgtaatcgttgcaggtgcgcaccagatactggtaccctataagaaaatgcggcggtggttggcggtagagaggccatcgttctgtagctggagcgccaggggcgaggtcttccaacataaggcggtgatagccgtagatgtacctggacatccaggtgattcctgcggcggtagtagaagcccgaggaaactcgcgtacgcggttccaaatgttgcgtagcggcatgaagtagttcattgtaggcacggtttgaccagtgaggcgcgcgcagtcattgatgctctatagacacggagaaaatgaaagcgttcagcgactcgactccgtagcctggaggaacgtgaacgggttgggtcgcggtgtaccccggttcgagacttgtactcgagccggccggagccgcggctaacgtggtattggcactcccgtctcgacccagcctacaaaaatccaggatacggaatcgagtcgttttgctggtttccgaatggcagggaagtgagtcctattttttttttttgccgctcagatgcatcccgtgctgcgacagatgcgcccccaacaacagcccccctcgcagcagcagcagcagcaatcacaaaaggctgtccctgcaactactgcaactgccgccgtgagcggtgcgggacagcccgcctatgatctggacttggaagagggcgaaggactggcacgtctaggtgcgccttcacccgagcggcatccgcgagttcaactgaaaaaagattctcgcgaggcgtatgtgccccaacagaacctatttagagacagaagcggcgaggagccggaggagatgcgagcttcccgctttaacgcgggtcgtgagctgcgtcacggtttggaccgaagacgagtgttgcgggacgaggatttcgaagttgatgaaatgacagggatcagtcctgccagggcacacgtggctgcagccaaccttgtatcggcttacgagcagacagtaaaggaagagcgtaacttccaaaagtcttttaataatcatgtgcgaaccctgattgcccgcgaagaagttacccttggtttgatgcatttgtgggatttgatggaagctatcattcagaaccctactagcaaacctctgaccgcccagctgtttctggtggtgcaacacagcagagacaatgaggctttcagagaggcgctgctgaacatcaccgaacccgaggggagatggttgtatgatcttatcaacattctacagagtatcatagtgcaggagcggagcctgggcctggccgagaaggtggctgccatcaattactcggttttgagcttgggaaaatattacgctcgcaaaatctacaagactccatacgttcccatagacaaggaggtgaagatagatgggttctacatgcgcatgacgctcaaggtcttgaccctgagcgatgatcttggggtgtatcgcaatgacagaatgcatcgcgcggttagcgccagcaggaggcgcgagttaagcgacagggaactgatgcacagtttgcaaagagctctgactggagctggaaccgagggtgagaattacttcgacatgggagctgacttgcagtggcagcctagtcgcagggctctgagcgccgcgacggcaggatgtgagcttccttacatagaagaggcggatgaaggcgaggaggaagagggcgagtacttggaagactgatggcacaacccgtgttttttgctagatggaacagcaagcaccggatcccgcaatgcgggcggcgctgcagagccagccgtccggcattaactcctcggacgattggacccaggccatgcaacgtatcatggcgttgacgactcgcaaccccgaagcctttagacagcaaccccaggccaaccgtctatcggccatcatggaagctgtagtgccttcccgctctaatcccactcatgagaaggtcctggccatcgtgaacgcgttggtggagaacaaagctattcgtccagatgaggccggactggtatacaacgctctcttagaacgcgtggctcgctacaacagtagcaatgtgcaaaccaatttggaccgtatgataacagatgtacgcgaagccgtgtctcagcgcgaaaggttccagcgtgatgccaacctgggttcgctggtggcgttaaatgctttcttgagtactcagcctgctaatgtgccgcgtggtcaacaggattatactaactttttaagtgctttgagactgatggtatcagaagtacctcagagcgaagtgtatcagtccggtcctgattacttctttcagactagcagacagggcttgcagacggtaaatctgagccaagcttttaaaaaccttaaaggtttgtggggagtgcatgccccggtaggagaaagagcaaccgtgtctagcttgttaactccgaactcccgcctattattactgttggtagctcctttcaccgacagcggtagcatcgaccgtaattcctatttgggttacctactaaacctgtatcgcgaagccatagggcaaagtcaggtggacgagcagacctatcaagaaattacccaagtcagtcgcgctttgggacaggaagacactggcagtttggaagccactctgaacttcttgcttaccaatcggtctcaaaagatccctcctcaatatgctcttactgcggaggaggagaggatccttagatatgtgcagcagagcgtgggattgtttctgatgcaagagggggcaactccgactgcagcactggacatgacagcgcgaaatatggagcccagcatgtatgccagtaaccgacctttcattaacaaactgctggactacttgcacagagctgccgctatgaactctgattatttcaccaatgccatcttaaacccgcactggctgcccccacctggtttctacacgggcgaatatgacatgcccgaccctaatgacggatttctgtgggacgacgtggacagcgatgttttttcacctctttctgatcatcgcacgtggaaaaaggaaggcggcgatagaatgcattcttctgcatcgctgtccggggtcatgggtgctaccgcggctgagcccgagtctgcaagtccttttcctagtctacccttttctctacacagtgtacgtagcagcgaagtgggtagaataagtcgcccgagtttaatgggcgaagaggagtatctaaacgattccttgctcagaccggcaagagaaaaaaatttcccaaacaatggaatagaaagtttggtggataaaatgagtagatggaagacttatgctcaggatcacagagacgagcctgggatcatggggattacaagtagagcgagccgtagacgccagcgccatgacagacagaggggtcttgtgtgggacgatgaggattcggccgatgatagcagcgtgctggacttgggtgggagaggaaggggcaacccgtttgctcatttgcgccctcgcttgggtggtatgttgtaaaaaaaaataaaaaaaaaactcaccaaggccatggcgacgagcgtacgttcgttcttctttattatctgtgtctagtataatgaggcgagtcgtgctaggcggagcggtggtgtatccggagggtcctcctccttcgtacgagagcgtgatgcagcagcagcaggcgacggcggtgatgcaatccccactggaggctccctttgtgcctccgcgatacctggcacctacggagggcagaaacagcattcgttattcggaactggcacctcagtacgataccaccaggttgtatctggtggacaacaagtcggcggacattgcttctctgaactatcagaatgaccacagcaacttcttgaccacggtggtgcaaaacaatgactttacccctacggaagccagcacccagaccattaactttgatgaacgatcgcggtggggcggtcagctaaagaccatcatgcatactaacatgccaaacgtgaacgagtatatgtttagtaacaagttcaaagcgcgtgtgatggtgtccagaaaacctcccgacggtgctgcagttggggatacttatgatcacaagcaggatattttgaaatatgagtggttcgagtttactttgccagaaggcaacttttcagttactatgactattgatttgatgaacaatgccatcatagataattacttgaaagtgggtagacagaatggagtgcttgaaagtgacattggtgttaagttcgacaccaggaacttcaagctgggatgggatcccgaaaccaagttgatcatgcctggagtgtatacgtatgaagccttccatcctgacattgtcttactgcctggctgcggagtggattttaccgagagtcgtttgagcaaccttcttggtatcagaaaaaaacagccatttcaagagggttttaagattttgtatgaagatttagaaggtggtaatattccggccctcttggatgtagatgcctatgagaacagtaagaaagaacaaaaagccaaaatagaagctgctacagctgctgcagaagctaaggcaaacatagttgccagcgactctacaagggttgctaacgctggagaggtcagaggagacaattttgcgccaacacctgttccgactgcagaatcattattggccgatgtgtctgaaggaacggacgtgaaactcactattcaacctgtagaaaaagatagtaagaatagaagctataatgtgttggaagacaaaatcaacacagcctatcgcagttggtatctttcgtacaattatggcgatcccgaaaaaggagtgcgttcctggacattgctcaccacctcagatgtcacctgcggagcagagcaggtctactggtcgcttccagacatgatgaaggatcctgtcactttccgctccactagacaagtcagtaactaccctgtggtgggtgcagagcttatgcccgtcttctcaaagagcttctacaacgaacaagctgtgtactcccagcagctccgccagtccacctcgcttacgcacgtcttcaaccgctttcctgagaaccagattttaatccgtccgccggcgcccaccattaccaccgtcagtgaaaacgttcctgctctcacagatcacgggaccctgccgttgcgcagcagtatccggggagtccaacgtgtgaccgttactgacgccagacgccgcacctgtccctacgtgtacaaggcactgggcatagtcgcaccgcgcgtcctttcaagccgcactttctaaaaaaaaaaaaaatgtccattcttatctcgcccagtaataacaccggttggggtctgcgcgctccaagcaagatgtacggaggcgcacgcaaacgttctacccaacatcctgtccgtgttcgcggacattttcgcgctccatggggcgccctcaagggccgcactcgcgttcgaaccaccgtcgatgatgtaatcgatcaggtggttgccgacgcccgtaattatactcctactgcgcctacatctactgtggatgcagttattgacagtgtagtggctgacgctcgcaactatgctcgacgtaagagccggcgaaggcgcattgccagacgccaccgagctaccactgccatgcgagccgcaagagctctgctacgaagagctagacgcgtggggcgaagagccatgcttagggcggccagacgtgcagcttcgggcgccagcgccggcaggtcccgcaggcaagcagccgctgtcgcagcggcgactattgccgacatggcccaatcgcgaagaggcaatgtatactgggtgcgtgacgctgccaccggtcaacgtgtacccgtgcgcacccgtccccctcgcacttagaagatactgagcagtctccgatgttgtgtcccagcggcgaggatgtccaagcgcaaatacaaggaagaaatgctgcaggttatcgcacctgaagtctacggccaaccgttgaaggatgaaaaaaaaccccgcaaaatcaagcgggttaaaaaggacaaaaaagaagaggaagatggcgatgatgggctggcggagtttgtgcgcgagtttgccccacggcgacgcgtgcaatggcgtgggcgcaaagttcgacatgtgttgagacctggaacttcggtggtctttacacccggcgagcgttcaagcgctacttttaagcgttcctatgatgaggtgtacggggatgatgatattcttgagcaggcggctgaccgattaggcgagtttgcttatggcaagcgtagtagaataacttccaaggatgagacagtgtcgatacccttggatcatggaaatcccacccctagtcttaaaccggtcactttgcagcaagtgttacccgtaactccgcgaacaggtgttaaacgcgaaggtgaagatttgtatcccactatgcaactgatggtacccaaacgccagaagttggaggacgttttggagaaagtaaaagtggatccagatattcaacctgaggttaaagtgagacccattaagcaggtagcgcctggtctgggggtacaaactgtagacattaagattcccactgaaagtatggaagtgcaaactgaacccgcaaagcctactgccacctccactgaagtgcaaacggatccatggatgcccatgcctattacaactgacgccgccggtcccactcgaagatcccgacgaaagtacggtccagcaagtctgttgatgcccaattatgttgtacacccatctattattcctactcctggttaccgaggcactcgctactatcgcagccgaaacagtacctcccgccgtcgccgcaagacacctgcaaatcgcagtcgtcgccgtagacgcacaagcaaaccgactcccggcgccctggtgcggcaagtgtaccgcaatggtagtgcggaacctttgacactgccgcgtgcgcgttaccatccgagtatcatcacttaatcaatgttgccgctgcctccttgcagatatggccctcacttgtcgccttcgcgttcccatcactggttaccgaggaagaaactcgcgccgtagaagagggatgttgggacgcggaatgcgacgctacaggcgacggcgtgctatccgcaagcaattgcggggtggttttttaccagccttaattccaattatcgctgctgcaattggcgcgataccaggcatagcttccgtggcggttcaggcctcgcaacgacattgacattggaaaaaaacgtataaataaaaaaaaaaaaatacaatggactctgacactcctggtcctgtgactatgttttcttagagatggaagacatcaatttttcatccttggctccgcgacacggcacgaagccgtacatgggcacctggagcgacatcggcacgagccaactgaacgggggcgccttcaattggagcagtatctggagcgggcttaaaaattttggctcaaccataaaaacatacgggaacaaagcttggaacagcagtacaggacaggcgcttagaaataaacttaaagaccagaacttccaacaaaaagtagtcgatgggatagcttccggcatcaatggagtggtagatttggctaaccaggctgtgcagaaaaagataaacagtcgtttggacccgccgccagcaaccccaggtgaaatgcaagtggaggaagaaattcctccgccagaaaaacgaggcgacaagcgtccgcgtcccgatttggaagagacgctggtgacgcgcgtagatgaaccgccttcttatgaggaagcaacgaagcttggaatgcccaccactagaccgatagccccaatggccaccggggtgatgaaaccttctcagttgcatcgacccgtcaccttggatttgccccctccccctgctgctactgctgtacccgcttctaagcctgtcgctgccccgaaaccagtcgccgtagccaggtcacgtcccgggggcgctcctcgtccaaatgcgcactggcaaaatactctgaacagcatcgtgggtctaggcgtgcaaagtgtaaaacgccgtcgctgcttttaattaaatatggagtagcgcttaacttgcctatctgtgtatatgtgtcattacacgccgtcacagcagcagaggaaaaaaggaagaggtcgtgcgtcgacgctgagttactttcaagatggccaccccatcgatgctgccccaatgggcatacatgcacatcgccggacaggatgcttcggagtacctgagtccgggtctggtgcagttcgcccgcgccacagacacctacttcaatctgggaaataagtttagaaatcccaccgtagcgccgacccacgatgtgaccaccgaccgtagccagcggctcatgttgcgcttcgtgcccgttgaccgggaggacaatacatactcttacaaagtgcggtacaccctggccgtgggcgacaacagagtgctggatatggccagcacgttctttgacattaggggtgtgttggacagaggtcccagtttcaaaccctattctggtacggcttacaactccctggctcctaaaggcgctccaaatacatctcagtggattgcagaaggtgtaaaaaatacaactggtgaggaacacgtaacagaagaggaaaccaatactactacttacacttttggcaatgctcctgtaaaagctgaagctgaaattacaaaagaaggactcccagtaggtttggaagtttcagatgaagaaagtaaaccgatttatgctgataaaacatatcagccagaacctcagctgggagatgaaacttggactgaccttgatggaaaaaccgaaaagtatggaggcagggctctcaaacccgatactaagatgaaaccatgctacgggtcctttgccaaacctactaatgtgaaaggcggtcaggcaaaacaaaaaacaacggagcagccaaatcagaaagtcgaatatgatatcgacatggagttttttgatgcggcatcgcagaaaacaaacttaagtcctaaaattgtcatgtatgcagaaaatgtaaatttggaaactccagacactcatgtagtgtacaaacctggaacagaagacacaagttccgaagctaatttgggacaacaatctatgcccaacagacccaactacattggcttcagagataactttattggacttatgtactataacagtactggtaacatgggggtgctggctggtcaagcgtctcagttaaatgcagtggttgacttgcaggacagaaacacagaactttcttaccaactcttgcttgactctctgggcgacagaaccagatactttagcatgtggaatcaggctgtggacagttatgatcctgatgtacgtgttattgaaaatcatggtgtggaagatgaacttcccaactactgttttccactggacggcataggtgttccaacaaccagttacaaatcaatagttccaaatggagacaatgcgcctaattggaaggaacctgaagtaaatggaacaagtgagatcggacagggtaatttgtttgccatggaaattaaccttcaagccaatctatggcgaagtttcctttattccaatgtggctctatatctcccagactcgtacaaatacaccccgtccaatgtcactcttccagaaaacaaaaacacctacgactacatgaacgggcgggtggtgccgccatctctagtagacacctatgtgaacattggtgccaggtggtctctggatgccatggacaatgtcaacccattcaaccaccaccgtaacgctggcttgcgttaccgatccatgcttctgggtaacggacgttatgtgcctttccacatacaagtgcctcaaaaattcttcgctgttaaaaacctgctgcttctcccaggctcctacacttatgagtggaactttaggaaggatgtgaacatggttctacagagttccctcggtaacgacctgcgggtagatggcgccagcatcagtttcacgagcatcaacctctatgctacttttttccccatggctcacaacaccgcttccacccttgaagccatgctgcggaatgacaccaatgatcagtcattcaacgactacctatctgcagctaacatgctctaccccattcctgccaatgcaaccaatattcccatttccattccttctcgcaactgggcggctttcagaggctggtcatttaccagactgaaaaccaaagaaactccctctttggggtctggatttgacccctactttgtctattctggttctattccctacctggatggtaccttctacctgaaccacacttttaagaaggtttccatcatgtttgactcttcagtgagctggcctggaaatgacaggttactatctcctaacgaatttgaaataaagcgcactgtggatggcgaaggctacaacgtagcccaatgcaacatgaccaaagactggttcttggtacagatgctcgccaactacaacatcggctatcagggcttctacattccagaaggatacaaagatcgcatgtattcatttttcagaaacttccagcccatgagcaggcaggtggttgatgaggtcaattacaaagacttcaaggccgtcgccataccctaccaacacaacaactctggctttgtgggttacatggctccgaccatgcgccaaggtcaaccctatcccgctaactatccctatccactcattggaacaactgccgtaaatagtgttacgcagaaaaagttcttgtgtgacagaaccatgtggcgcataccgttctcgagcaacttcatgtctatgggggcccttacagacttgggacagaatatgctctatgccaactcagctcatgctctggacatgacctttgaggtggatcccatggatgagcccaccctgctttatcttctcttcgaagttttcgacgtggtcagagtgcatcagccacaccgcggcatcatcgaggcagtctacctgcgtacaccgttctcggccggtaacgctaccacgtaagaagcttcttgcttcttgcaaatagcagctgcaaccatggcctgcggatcccaaaacggctccagcgagcaagagctcagagccattgtccaagacctgggttgcggaccctattttttgggaacctacgataagcgcttcccggggttcatggcccccgataagctcgcctgtgccattgtaaatacggccggacgtgagacggggggagagcactggttggctttcggttggaacccacgttctaacacctgctacctttttgatccttttggattctcggatgatcgtctcaaacagatttaccagtttgaatatgagggtctcctgcgccgcagcgctcttgctaccaaggaccgctgtattacgctggaaaaatctacccagaccgtgcagggtccccgttctgccgcctgcggacttttctgctgcatgttccttcacgcctttgtgcactggcctgaccgtcccatggacggaaaccccaccatgaaattgctaactggagtgccaaacaacatgcttcattctcctaaagtccagcccaccctgtgtgacaatcaaaaagcactctaccattttcttaatacccattcgccttattttcgctcccatcgtacacacatcgaaagggccactgcgttcgaccgtatggatgttcaataatgactcatgtaaacaacgtgttcaataaacatcactttatttttttacatgtatcaaggctctgcattacttatttatttacaagtcgaatgggttctgacgagaatcagaatgacccgcaggcagtgatacgttgcggaactgatacttgggttgccacttgaattcgggaatcaccaacttgggaaccggtatatcgggcaggatgtcactccacagctttctggtcagctgcaaagctccaagcaggtcaggagccgaaatcttgaaatcacaattaggaccagtgctttgagcgcgagagttgcggtacaccggattgcagcactgaaacaccatcagcgacggatgtctcacgcttgccagcacggtgggatctgcaatcatgcccacatccagatcttcagcattggcaatgctgaacggggtcatcttgcaggtctgcctacccatggcgggcacccaattaggcttgtggttgcaatcgcagtgcagggggatcagtatcatcttggcctgatcctgtctgattcctggatacacggctctcatgaaagcatcatattgcttgaaagcctgctgggctttactaccctcggtataaaacatcccgcaggacctgctcgaaaactggttagctgcacagccggcatcattcacacagcagcgggcgtcattgttagctatttgcaccacacttctgccccagcggttttgggtgattttggttcgctcgggattctcctttaaggctcgttgtccgttctcgctggccacatccatctcgataatctgctccttctgaatcataatattgccatgcaggcacttcagcttgccctcataatcattgcagccatgaggccacaacgcacagcctgtacattcccaattatggtgggcgatctgagaaaaagaatgtatcattccctgcagaaatcttcccatcatcgtgctcagtgtcttgtgactagtgaaagttaactggatgcctcggtgctcctcgtttacgtactggtgacagatgcgcttgtattgttcgtgttgctcaggcattagtttaaaagaggttctaagttcgttatccagcctgtacttctccatcagcagacacatcacttccatgcctttctcccaagcagacaccaggggcaagctaatcggattcttaacagtgcaggcagcagctcctttagccagagggtcatctttagcgatcttctcaatgcttcttttgccatccttctcaacgatgcgcacgggcgggtagctgaaacccactgctacaagttgcgcctcttctctttcttcttcgctgtcttgactgatgtcttgcatggggatatgtttggtcttccttggcttctttttggggggtatcggaggaggaggactgtcgctccgttccggagacagggaggattgtgacgtttcgctcaccattaccaactgactgtcggtagaagaacctgaccccacacggcgacaggtgtttctcttcgggggcagaggtggaggcgattgcgaagggctgcggtccgacctggaaggcggatgactggcagaaccccttccgcgttcgggggtgtgctccctgtggcggtcgcttaactgatttccttcgcggctggccattgtgttctcctaggcagagaaacaacagacatggaaactcagccattgctgtcaacatcgccacgagtgccatcacatctcgtcctcagcgacgaggaaaaggagcagagcttaagcattccaccgcccagtcctgccaccacctctaccctagaagataaggaggtcgacgcatctcatgacatgcagaataaaaaagcgaaagagtctgagacagacatcgagcaagacccgggctatgtgacaccggtggaacacgaggaagagttgaaacgctttctagagagagaggatgaaaactgcccaaaacaacgagcagataactatcaccaagatgctggaaatagggatcagaacaccgactacctcatagggcttgacggggaagacgcgctccttaaacatctagcaagacagtcgctcatagtcaaggatgcattattggacagaactgaagtgcccatcagtgtggaagagctcagccgcgcctacgagcttaacctcttttcacctcgtactccccccaaacgtcagccaaacggcacctgcgagccaaatcctcgcttaaacttttatccagcttttgctgtgccagaagtactggctacctatcacatcttttttaaaaatcaaaaaattccagtctcctgccgcgctaatcgcacccgcgccgatgccctactcaatctgggacctggttcacgcttacctgatatagcttccttggaagaggttccaaagatcttcgagggtctgggcaataatgagactcgggccgcaaatgctctgcaaaagggagaaaatggcatggatgagcatcacagcgttctggtggaattggaaggcgataatgccagactcgcagtactcaagcgaagcatcgaggtcacacacttcgcatatcccgctgtcaacctgccccctaaagtcatgacggcggtcatggaccagttactcattaagcgcgcaagtcccctttcagaagacatgcatgacccagatgcctgtgatgagggtaaaccagtggtcagtgatgagcagctaacccgatggctgggcaccgactctcccagggatttggaagagcgtcgcaagcttatgatggccgtggtgctggttaccgtagaactagagtgtctccgacgtttctttaccgattcagaaaccttgcgcaaactcgaagagaatctgcactacacttttagacacggctttgtgcggcaggcatgcaagatatctaacgtggaactcaccaacctggtttcctacatgggtattctgcatgagaatcgcctaggacaaagcgtgctgcacagcaccctgaagggggaagcccgccgtgattacatccgcgattgtgtctatctgtacctgtgccacacgtggcaaaccggcatgggtgtatggcagcaatgtttagaagaacagaacttgaaagagcttgacaagctcttacagaaatctcttaaggttctgtggacagggttcgacgagcgcaccgtcgcttccgacctggcagacctcatcttcccagagcgtctcagggttactttgcgaaacggattgcctgactttatgagccagagcatgcttaacaattttcgctctttcatcctggaacgctccggtatcctgcccgccacctgctgcgcactgccctccgactttgtgcctctcacctaccgcgagtgccccccgccgctatggagtcactgctacctgttccgtctggccaactatctctcctaccactcggatgtgatcgaggatgtgagcggagacggcttgctggagtgtcactgccgctgcaatctgtgcacgccccaccggtccctagcttgcaacccccagttgatgagcgaaacccagataataggcacctttgaattgcaaggccccagcagccaaggcgatgggtcttctcctgggcaaagtttaaaactgaccccgggactgtggacctccgcctacttgcgcaagtttgctccggaagattaccacccctatgaaatcaagttctatgaggaccaatcacagcctccaaaggccgaactttcggcctgcgtcatcacccagggggcaattctggcccaattgcaagccatccaaaaatcccgccaagaatttctactgaaaaagggtaagggggtctaccttgacccccagaccggcgaggaactcaacacaaggttccctcaggatgtcccaacgacgagaaaacaagaagttgaaggtgcagccgccgcccccagaagatatggaggaagattgggacagtcaggcagaggaggcggaggaggacagtctggaggacagtctggaggaagacagtttggaggaggaaaacgaggaggcagaggaggtggaagaagtaaccgccgacaaacagttatcctcggctgcggagacaagcaacagcgctaccatctccgctccgagtcgaggaacccggcggcgtcccagcagtagatgggacgagaccggacgcttcccgaacccaaccagcgcttccaagaccggtaagaaggatcggcagggatacaagtcctggcgggggcataagaatgccatcatctcctgcttgcatgagtgcgggggcaacatatccttcacgcggcgctacttgctattccaccatggggtgaactttccgcgcaatgttttgcattactaccgtcacctccacagcccctactatagccagcaaatcccggcagtctcgacagataaagacagcggcggcgacctccaacagaaaaccagcagcggcagttagaaaatacacaacaagtgcagcaacaggaggattaaagattacagccaacgagccagcgcaaacccgagagttaagaaatcggatctttccaaccctgtatgccatcttccagcagagtcggggtcaagagcaggaactgaaaataaaaaaccgatctctgcgttcgctcaccagaagttgtttgtatcacaagagcgaagatcaacttcagcgcactctcgaggacgccgaggctctcttcaacaagtactgcgcgctgactcttaaagagtaggcagcgaccgcgcttattcaaaaaaggcgggaattacatcatcctcgacatgagtaaagaaattcccacgccttacatgtggagttatcaaccccaaatgggattggcggcaggcgcctcccaggactactccacccgcatgaattggctcagcgccgggccttctatgatttctcgagttaatgatatacgcgcctaccgaaaccaaatacttttggaacagtcagctcttaccaccacgccccgccaacaccttaatcccagaaattggcccgccgccctagtgtaccaggaaagtcccgctcccaccactgtattacttcctcgagacgcccaggccgaagtccaaatgactaatgcaggtgcgcagttagctggcggctccaccctatgtcgtcacaggcctcggcataatataaaacgcctgatgatcagaggccgaggtatccagctcaacgacgagtcggtgagctctccgcttggtctacgaccagacggaatctttcagattgccggctgcgggagatcttccttcacccctcgtcaggctgttctgactttggaaagttcgtcttcgcaaccccgctcgggcggaatcgggaccgttcaatttgtggaggagtttactccctctgtctacttcaaccccttctccggatctcctgggcattacccggacgagttcataccgaacttcgacgcgattagcgagtcagtggacggctacgattgatgtctggtgacgcggctgagctatctcggctgcgacatctagaccactgccgccgctttcgctgctttgcccgggaactcattgagttcatctacttcgaactccccaaggatcaccctcaaggtccggcccacggagtgcggatttctatcgaaggcaaaatagactctcgcctgcaacgaattttctcccagcggcccgtgctgatcgagcgagaccagggaaacaccacggtttccatctactgcatttgtaatcaccccggattgcatgaaagcctttgctgtcttatgtgtactgagtttaataaaaactgaattaagactctcctacggactgccgcttcttcaacccggattttacaaccagaagaacgaaacttttcctgtcgtccaggactctgttaacttcacctttcctactcacaaactagaagctcaacgactacaccgcttttccagaagcattttccctactaatactactttcaaaaccggaggtgagctccaaggtcttcctacagaaaacccttgggtggaagcgggccttgtagtgctaggaattcttgcgggtgggcttgtgattattctttgctacctatacacaccttgcttcactttcttagtggtgttgtggtattggtttaaaaaatggggcccatactagtcttgcttgttttactttcgcttttggaaccgggttctgccaattacgatccatgtctagacttcgacccagaaaactgcacacttacttttgcacccgacacaagccgcatctgtggagttcatcgcctctcttacgaacttggcccccaacgacaaaaatttacctgcatggtgggaatcaaccccatagttatcacccagcaaagtggagatactaagggttgcattcactgctcctgcgattccatcgagtgcacctacaccctgctgaagaccctatgcggcctaagagacctgctaccaatgaattaaaaaatgattaataaaaaatcacttacttgaaatcagcaataaggtctctgttgaaattttctcccagcagcacctcacttccctcttcccaactctggtattctaaaccccgttcagcggcatactttctccatactttaaaggggatgtcaaattttagctcctctcctgtacccacaatcttcatgtctttcttcccagatgaccaagagagtccggctcagtgactccttcaaccctgtctacccctatgaagatgaaagcacctcccaacacccctttataaacccagggtttatttccccaaatggcttcacacaaagcccaaacggagttcttactttaaaatgtttaaccccactaacaaccacaggcggatctctacagctaaaagtgggagggggacttacagtggatgacaccaacggttttttgaaagaaaacataagtgccaccacaccactcgttaagactggtcactctataggtttaccactaggagccggattgggaacgaatgaaaataaactttgtatcaaattaggacaaggacttacattcaattcaaacaacatttgcattgatgacaatattaacaccttatggacaggagtcaaccccaccgaagccaactgtcaaatcatgaactccagtgaatctaatgattgcaaattaattctaacactagttaaaactggagcactagtcactgcatttgtttatgttataggagtatctaacaattttaatatgctaactacacacagaaatataaattttactgcagagctgtttttcgattctactggtaatttactaactagactctcatccctcaaaactccacttaatcataaatcaggacaaaacatggctactggtgccattactaatgctaaaggtttcatgcccagcacgactgcctatcctttcaatgataattctagagaaaaagaaaactacatttacggaacttgttactacacagctagtgatcgcactgcttttcccattgacatatctgtcatgcttaaccgaagagcaataaatgacgagacatcatattgtattcgtataacttggtcctggaacacaggagatgccccagaggtgcaaacctctgctacaaccctagtcacctccccatttaccttttactacatcagagaagacgactgacaaataaagtttgcgatcgccaggcccaccatgtgtcaccagcagttggtcatctcttggttttccctggtttttctggcatctcccctcgtggccatatgggaactgaagaaagatgtttatgtcgtagaattggattggtatccggatgcccctggagaaatggtggtcctcacctgtgacacccctgaagaagatggtatcacctggaccttggaccagagcagtgaggtcttaggctctggcaaaaccctgaccatccaagtcaaagagtttggagatgctggccagtacacctgtcacaaaggaggcgaggttctaagccattcgctcctgctgcttcacaaaaaggaagatggaatttggtccactgatattttaaaggaccagaaagaacccaaaaataagacctttctaagatgcgaggccaagaattattctggacgtttcacctgctggtggctgacgacaatcagtactgatttgacattcagtgtcaaaagcagcagaggctcttctgacccccaaggggtgacgtgcggagctgctacactctctgcagagagagtcagaggggacaacaaggagtatgagtactcagtggagtgccaggaggacagtgcctgcccagctgctgaggagagtctgcccattgaggtcatggtggatgccgttcacaagctcaagtatgaaaactacaccagcagcttcttcatcagggacatcatcaaacctgacccacccaagaacttgcagctgaagccattaaagaattctcggcaggtggaggtcagctgggagtaccctgacacctggagtactccacattcctacttctccctgacattctgcgttcaggtccagggcaagagcaagagagaaaagaaagatagagtcttcacggacaagacctcagccacggtcatctgccgcaaaaatgccagcattagcgtgcgggcccaggaccgctactatagctcatcttggagcgaatgggcatctgtgccctgcagtggagggggcggcagcgggggaggcggcagcggcggcgggggatcgagaaacctccccgtggccactccagacccaggaatgttcccatgccttcaccactcccaaaacctgctgagggccgtcagcaacatgctccagaaggccagacaaactctagaattttacccttgcacttctgaagagattgatcatgaagatatcacaaaagataaaaccagcacagtggaggcctgtttaccattggaattaaccaagaatgagagttgcctaaattccagagagacctctttcataactaatgggagttgcctggcctccagaaagacctcttttatgatggccctgtgccttagtagtatttatgaagacttgaagatgtaccaggtggagttcaagaccatgaatgcaaagcttctgatggatcctaagaggcagatctttctagatcaaaacatgctggcagttattgatgagctgatgcaggccctgaatttcaacagtgagactgtgccacaaaaatcctcccttgaagaaccggatttttataaaactaaaatcaagctctgcatacttcttcatgctttcagaattcgggcagtgactattgatagagtgatgagctatctgaatgcttccggaagcggagctactaacttcagcctgctgaagcaggctggagacgtggaggagaaccctggacctaagaaaagtggtgttcttttcctcttgggcatcatcttgctggttctgattggagtgcaaggaaccccagtagtgagaaagggtcgctgttcctgcatcagcaccaaccaagggactatccacctacaatccttgaaagaccttaaacaatttgccccaagcccttcctgcgagaaaattgaaatcattgctacactgaagaatggagttcaaacatgtctaaacccagattcagcagatgtgaaggaactgattaaaaagtgggagaaacaggtcagccaaaagaaaaagcaaaagaatgggaaaaaacatcaaaaaaagaaagttctgaaagttcgaaaatctcaacgttctcgtcaaaagaagactacaggaagcggacagtgtactaattatgctctcttgaaattggctggagatgttgagagcaaccctggacctgactggacctggcgcatcctgttcttggtggcagctgctacgggagctcattccaactgggtgaatgtaataagtgatttgaaaaaaattgaagatcttattcaatctatgcatattgatgctactttatatacggaaagtgatgttcaccccagttgcaaagtaacagcaatgaagtgctttctcttggagttacaagttatttcacttgagtccggagatgcaagtattcatgatacagtagaaaatctgatcatcctagcaaacaacagtttgtcttctaatgggaatgtaacagaatctggatgcaaagaatgtgaggaactggaggaaaaaaatattaaagaatttttgcagagttttgtacatattgtccaaatgttcatcaacacttctggaagcggagagggcagaggaagtctgctaacatgcggtgacgtcgaggagaatcctggacctgccttgacctttgctttactggtggccctcctggtgctcagctgcaagtcaagctgctctgtgggctgtgatctgcctcaaacccacagcctgggtagcaggaggaccttgatgctcctggcacagatgaggagaatctctcttttctcctgcttgaaggacagacatgactttggatttccccaggaggagtttggcaaccagttccaaaaggctgaaaccatccctgtcctccatgagatgatccagcagatcttcaatctcttcagcacaaaggactcatctgctgcttgggatgagaccctcctagacaaattctacactgaactctaccagcagctgaatgacctggaagcctgtgtgatacagggggtgggggtgacagagactcccctgatgaaggaggactccattctggctgtgaggaaatacttccaaagaatcactctctatctgaaagagaagaaatacagcccttgtgcctgggaggttgtcagagcagaaatcatgagatctttttctttgtcaacaaacttgcaagaaagtttaagaagtaaggaaggaagcggagtgaaacagactttgaattttgaccttctcaagttggcgggagacgtggagtccaaccctggacctgctcagtcactggctctgagcctccttatcctggttctggcctttggcatccccaggacccaaggcagtgatggaggggctcaggactgttgcctcaagtacagccaaaggaagattcccgccaaggttgtccgcagctaccggaagcaggaaccaagcttaggctgctccatcccagctatcctgttcttgccccgcaagcgctctcaggcagagctatgtgcagacccaaaggagctctgggtgcagcagctgatgcagcatctggacaagacaccatccccacagaaaccagcccagggctaagctagcttgactgactgagatacagcgtaccttcagctcacagacatgataagatacattgatgagtttggacaaaccacaactagaatgcagtgaaaaaaatgctttatttgtgaaatttgtgatgctattgctttatttgtaaccattataagctgcaataaacaagttaacaacaacaattgcattcattttatgtttcaggttcagggggaggtgtgggaggttttttaaagcaagtaaaacctctacaaatgtggtagtcgtcagctatcctgcaggaacttgtttatttgaaaatcaattcacaaaatccgagtagttattttgcctcccccttcccatttaacagaatacaccaatctctccccacgcacagctttaaacatttggataccattagatatagacatggttttagattccacattccaaacagtttcagagcgagccaatctggggtcagtgatagataaaaatccatcgggatagtcttttaaagcgctttcacagtccaactgctgcggatgcgactccggagtctggatcacggtcatctggaagaagaacgatgggaatcataatccgaaaacggtatcggacgattgtgtctcatcaaacccacaagcagccgctgtctgcgtcgctccgtgcgactgctgtttatgggatcagggtccacagtgtcctgaagcatgattttaatagcccttaacatcaactttctggtgcgatgcgcgcagcaacgcattctgatttcactcaaatctttgcagtaggtacaacacattattacaatattgtttaataaaccataattaaaagcgctccagccaaaactcatatctgatataatcgcccctgcatgaccatcataccaaagtttaatataaattaaatgacgttccctcaaaaacacactacccacatacatgatctcttttggcatgtgcatattaacaatctgtctgtaccatggacaacgttggttaatcatgcaacccaatataaccttccggaaccacactgccaacaccgctcccccagccatgcattgaagtgaaccctgctgattacaatgacaatgaagaacccaattctctcgaccgtgaatcacttgagaatgaaaaatatctatagtggcacaacatagacataaatgcatgcatcttctcataatttttaactcctcaggatttagaaacatatcccagggaataggaagctcttgcagaacagtaaagctggcagaacaaggaagaccacgaacacaacttacactatgcatagtcatagtatcacaatctggcaacagcgggtggtcttcagtcatagaagctcgggtttcattttcctcacaacgtggtaactgggctctggtgtaagggtgatgtctggcgcatgatgtcgagcgtgcgcgcaaccttgtcataatggagttgcttcctgacattctcgtattttgtatagcaaaacgcggccctggcagaacacactcttcttcgccttctatcctgccgcttagcgtgttccgtgtgatagttcaagtacaaccacactcttaagttggtcaaaagaatgctggcttcagttgtaatcaaaactccatcgcatctaatcgttctgaggaaatcatccaagcaatgcaactggattgtgtttcaagcaggagaggagagggaagagacggaagaaccatgttaatttttattccaaacgatctcgcagtacttcaaattgtagatcgcgcagatggcatctctcgcccccactgtgttggtgaaaaagcacagctagatcaaaagaaatgcgattttcaaggtgctcaacggtggcttccagcaaagcctccacgcgcacatccaagaacaaaagaataccaaaagaaggagcattttctaactcctcaatcatcatattacattcctgcaccattcccagataattttcagctttccagccttgaattattcgtgtcagttcttgtggtaaatccaatccacacattacaaacaggtcccggagggcgccctccaccaccattcttaaacacaccctcataatgacaaaatatcttgctcctgtgtcacctgtagcgaattgagaatggcaacatcaattgacatgcccttggctctaagttcttctttaagttctagttgtaaaaactctctcatattatcaccaaactgcttagccagaagccccccgggaacaagagcaggggacgctacagtgcagtacaagcgcagacctccccaattggctccagcaaaaacaagattggaataagcatattgggaaccgccagtaatatcatcgaagttgctggaaatataatcaggcagagtttcttgtaaaaattgaataaaagaaaaatttgccaaaaaaacattcaaaacctctgggatgcaaatgcaataggttaccgcgctgcgctccaacattgttagttttgaattagtctgcaaaaataaaaaaaaaaacaagcgtcatatcatagtagcctgacgaacagatggataaatcagtctttccatcacaagacaagccacagggtctccagctcgaccctcgtaaaacctgtcatcatgattaaacaacagcaccgaaagttcctcgcggtgaccagcatgaataattcttgatgaagcatacaatccagacatgttagcatcagttaacgagaaaaaacagccaacatagcctttgggtataattatgcttaatcgtaagtatagcaaagccacccctcgcggatacaaagtaaaaggcacaggagaataaaaaatataattatttctctgctgctgttcaggcaacgtcgcccccggtccctctaaatacacatacaaagcctcatcagccatggcttaccagacaaagtacagcgggcacacaaagcacaagctctaaagtgactctccaacctctccacaatatatatatacacaagccctaaactgacgtaatgggagtaaagtgtaaaaaatcccgccaaacccaacacacaccccgaaactgcgtcaccagggaaaagtacagtttcacttccgcaatcccaacaggcgtaacttcctctttctcacggtacgtgatatcccactaacttgcaacgtcattttcccacggtcgcaccgccccttttagccgttaaccccacagccaatcaccacacgatccacactttttaaaatcacctcatttacatattggcaccattccatctataaggtatattatatagataga

SEQ ID NO: 87 - DNA, 36250 bp, Artificial Sequence
  Genome sequence of NG-725 virus
tctatctatataatataccttatagatggaatggtgccaatatgtaaatgaggtgattttaaaaagtgtggatcgtgtggtgattggctgtggggttaacggctaaaaggggcggtgcgaccgtgggaaaatgacgttttgtgggggtggagtttttttgcaagttgtcgcgggaaatgtgacgcataaaaaggcttttttctcacggaactacttagttttcccacggtatttaacaggaaatgaggtagttttgaccggatgcaagtgaaaattgttgattttcgcgcgaaaactgaatgaggaagtgtttttctgaataatgtggtatttatggcagggtggagtatttgttcagggccaggtagactttgacccattacgtggaggtttcgattaccgtgttttttacctgaatttccgcgtaccgtgtcaaagtcttctgtttttacgtaggtgtcagctgatcgctagggtatttatacctcagggtttgtgtcaagaggccactcttgagtgccagcgagaagagttttctcctctgcgccggcagtttaataataaaaaaatgagagatttgcgatttctgcctcaggaaataatctctgctgagactggaaatgaaatattggagcttgtggtgcacgccctgatgggagacgatccggagccacctgtgcagctttttgagcctcctacgcttcaggaactgtatgatttagaggtagagggatcggaggattctaatgaggaagctgtaaatggcttttttaccgattctatgcttttagctgctaatgaagggttagaattagatccgcctttggacacttttgatactccaggggtaattgtggaaagcggtacaggtgtaagaaaattacctgatttgagttccgtggactgtgatttgcactgctatgaagacgggtttcctccgagtgatgaggaggaccatgaaaaggagcagtccatgcagactgcagcgggtgagggagtgaaggctgccaatgttggttttcagttggattgcccggagcttcctggacatggctgtaagtcttgtgaatttcacaggaaaaatactggagtaaaggaactgttatgttcgctttgttatatgagaacgcactgccactttatttacagtaagtgtgtttaagttaaaatttaaaggaatatgctgtttttcacatgtatattgagtgtgagttttgtgcttcttattataggtcctgtgtctgatgctgatgaatcaccatctcctgattctactacctcacctcctgagattcaagcacctgttcctgtggacgtgcgcaagcccattcctgtgaagcttaagcctgggaaacgtccagcagtggaaaaacttgaggacttgttacagggtggggacggacctttggacttgagtacacggaaacgtccaagacaataagtgttccatatccgtgtttacttaaggtgacgtcaatatttgtgtgacagtgcaatgtaataaaaatatgttaactgttcactggtttttattgctttttgggcggggactcaggtatataagtagaagcagacctgtgtggttagctcataggagctggctttcatccatggaggtttgggccattttggaagaccttaggaagactaggcaactgttagagaacgcttcggacggagtctccggtttttggagattctggttcgctagtgaattagctagggtagtttttaggataaaacaggactataaacaagaatttgaaaagttgttggtagattgcccaggactttttgaagctcttaatttgggccatcaggttcactttaaagaaaaagttttatcagttttagacttttcaaccccaggtagaactgctgctgctgtggcttttcttacttttatattagataaatggatcccgcagactcatttcagcaggggatacgttttggatttcatagccacagcattgtggagaacatggaaggttcgcaagatgaggacaatcttaggttactggccagtgcagcctttgggtgtagcgggaatcctgaggcatccaccggtcatgccagcggttctggaggaggaacagcaagaggacaacccgagagccggcctggaccctccagtggaggaggcggagtagctgacttgtctcctgaactgcaacgggtgcttactggatctacgtccactggacgggataggggcgttaagagggagagggcatctagtggtactgatgctagatctgagttggctttaagtttaatgagtcgcagacgtcctgaaaccatttggtggcatgaggttcagaaagagggaagggatgaagtttctgtattgcaggagaaatattcactggaacaggtgaaaacatgttggttggagcctgaggatgattgggaggtggccattaaaaattatgccaagatagctttgaggcctgataaacagtataagattactagacggattaatatccggaatgcttgttacatatctggaaatggggctgaggtggtaatagatactcaagacaaggcagttattagatgctgcatgatggatatgtggcctggggtagtcggtatggaagcagtaacttttgtaaatgttaagtttaggggagatggttataatggaatagtgtttatggccaataccaaacttatattgcatggttgtagcttttttggtttcaacaatacctgtgtagatgcctggggacaggttagtgtacggggatgtagtttctatgcgtgttggattgccacagctggcagaaccaagagtcaattgtctctgaagaaatgcatatttcaaagatgtaacctgggcattctgaatgaaggcgaagcaagggtccgccactgcgcttctacagatactggatgttttattttgattaagggaaatgccagcgtaaagcataacatgatttgcggtgcttccgatgagaggccttatcaaatgctcacttgtgctggtgggcattgtaatatgctggctactgtgcatattgtttcccatcaacgcaaaaaatggcctgtttttgatcacaatgtgatgacgaagtgtaccatgcatgcaggtgggcgtagaggaatgtttatgccttaccagtgtaacatgaatcatgtgaaagtgttgttggaaccagatgccttttccagaatgagcctaacaggaatttttgacatgaacatgcaaatctggaagatcctgaggtatgatgatacgagatcgagggtacgcgcatgcgaatgcggaggcaagcatgccaggttccagccggtgtgtgtagatgtgactgaagatctcagaccggatcatttggttattgcccgcactggagcagagttcggatccagtggagaagaaactgactaaggtgagtattgggaaaactttggggtgggattttcagatggacagattgagtaaaaatttgttttttctgtcttgcagctgtcatgagtggaaacgcttcttttaaggggggagtcttcagcccttatctgacagggcgtctcccatcctgggcaggagttcgtcagaatgttatgggatctactgtggatggaagacccgtccaacccgccaattcttcaacgctgacctatgctactttaagttcttcacctttggacgcagctgcagctgccgccgccgcttctgttgccgctaacactgtgcttggaatgggttactatggaagcatcatggctaattccacttcctctaataacccttctaccctgactcaggacaagttacttgtccttttggcccagctggaggctttgacccaacgtctgggtgaactttctcagcaggtggtcgagttgcgagtacaaactgagtctgctgtcggcacggcaaagtctaaataaaaaaatcccagaatcaatgaataaataaacaagcttgttgttgatttaaaatcaagtgtttttatttcatttttcgcgcacggtatgccctagaccaccgatctctatcattgagaactcggtggattttttccaggatcctatagaggtgggattgaatgtttagatacatgggcattaggccgtctttggggtggagatagctccattgaagggattcatgctccggggtagtgttgtaaatcacccagtcataacaaggtcgcagtgcatggtgttgcacaatatcttttagaagtaggctgattgccacagataagcccttggtgtaggtgtttacaaaccggttgagctgggatgggtgcattcggggtgaaattatgtgcattttggattggatttttaagttggcaatattgccgccaagatcccgtcttgggttcatgttatgaaggaccaccaagacggtgtatccggtacatttaggaaatttatcgtgcagcttggatggaaaagcgtggaaaaatttggagacacccttgtgtcctccaagattttccatgcactcatccatgataatagcaatggggccgtgggcagcggcgcgggcaaacacgttccgtgggtctgacacatcatagttatgttcctgagttaaatcatcataagccattttaatgaatttggggcggagagtaccagattggggtatgaatgttccttcgggccccggagcatagttcccctcacagatttgcatttcccaagctttcagttccgagggtggaatcatgtccacctggggggctatgaaaaacaccgtttctggggcgggggtgattaattgtgatgatagcaaatttctgagcaattgagatttgccacatccggtggggccataaatgattccgattacgggttgcaggtggtagtttagggaacggcaactgccgtcttctcgaagcaagggggccacctcgttcatcatttcccttacatgcatattttcccgcaccaaatccattaggaggcgctctcctcctagtgatagaagttcttgtagtgaggaaaagtttttcagcggtttcagaccgtcagccatgggcattttggagagagtttgctgcaaaagttctagtctgttccacagttcagtgatgtgttctatggcatctcgatccagcagacctcctcgtttcgcgggtttggacggctcctggaatagggtatgagacgatgggcgtccagcgctgccagggttcggtccttccagggtctcagtgttcgagtcagggttgtttccgtcacagtgaaggggtgtgcgcctgcttgggcgcttgccagggtgcgcttcagactcatcctgctggtcgaaaacttctgtcgcttggcgccctgtatgtcggccaagtagcagtttaccatgagttcgtagttgagcgcctcggctgcgtggcctttggcgcggagcttacctttggaagttttcttgcataccgggcagtataggcatttcagcgcatacaacttgggcgcaaggaaaacggattctggggagtatgcatctgcgccgcaggaggcgcaaacagtttcacattccaccagccaggttaaatccggttcattggggtcaaaaacaagttttccgccatattttttgatgcgtttcttacctttggtctccatgagttcgtgtcctcgttgagtgacaaacaggctgtccgtgtccccgtagactgattttacaggcctcttctccagtggagtgcctcggtcttcttcgtacaggaactctgaccactctgatacaaaggcgcgcgtccaggccagcacaaaggaggctatgtgggaggggtagcgatcgttgtcaaccagggggtccaccttttccaaagtatgcaaacacatgtcaccctcttcaacatccaggaatgtgattggcttgtaggtgtatttcacgtgacctggggtccccgctgggggggtataaaagggggcggttctttgctcttcctcactgtcttccggatcgctgtccaggaacgtcagctgttggggtaggtattccctctcgaaggcgggcatgacctctgcactcaggttgtcagtttctaagaacgaggaggatttgatattgacagtgccggttgagatgcctttcatgaggttttcgtccatctggtcagaaaacacaatttttttattgtcaagtttggtggcaaatgatccatacagggcgttggataaaagtttggcaatggatcgcatggtttggttcttttccttgtccgcgcgctctttggcggcgatgttgagttggacatactcgcgtgccaggcacttccattcggggaagatagttgttaattcatctggcacgattctcacttgccaccctcgattatgcaaggtaattaaatccacactggtggccacctcgcctcgaaggggttcattggtccaacagagcctacctcctttcctagaacagaaagggggaagtgggtctagcataagttcatcgggagggtctgcatccatggtaaagattcccggaagtaaatccttatcaaaatagctgatgggagtggggtcatctaaggccatttgccattctcgagctgccagtgcgcgctcatatgggttaaggggactgccccatggcatgggatgggtgagtgcagaggcatacatgccacagatgtcatagacgtagatgggatcctcaaagatgcctatgtaggttggatagcatcgcccccctctgatacttgctcgcacatagtcatatagttcatgtgatggcgctagcagccccggacccaagttggtgcgattgggtttttctgttctgtagacgatctggcgaaagatggcgtgagaattggaagagatggtgggtctttgaaaaatgttgaaatgggcatgaggtagacctacagagtctctgacaaagtgggcataagattcttgaagcttggttaccagttcggcggtgacaagtacgtctagggcgcagtagtcaagtgtttcttgaatgatgtcataacctggttggtttttcttttcccacagttcgcggttgagaaggtattcttcgcgatccttccagtactcttctagcggaaacccgtctttgtctgcacggtaagatcctagcatgtagaactgattaactgccttgtaagggcagcagcccttctctacgggtagagagtatgcttgagcagcttttcgtagcgaagcgtgagtaagggcaaaggtgtctctgaccatgactttgaggaattggtatttgaagtcgatgtcgtcacaggctccctgttcccagagttggaagtctacccgtttcttgtaggcggggttgggcaaagcgaaagtaacatcattgaagagaatcttgccggccctgggcatgaaattgcgagtgatgcgaaaaggctgtggtacttccgctcggttattgataacctgggcagctaggacgatctcgtcgaaaccgttgatgttgtgtcctacgatgtataattctatgaaacgcggcgtgcctctgacgtgaggtagcttactgagctcatcaaaggttaggtctgtggggtcagataaggcgtagtgttcgagagcccattcgtgcaggtgaggattcgctttaaggaaggaggaccagaggtccactgccagtgctgtttgtaactggtcccggtactgacgaaaatgccgtccgactgccattttttctggggtgacgcaatagaaggtttgggggtcctgccgccagcgatcccacttgagttttatggcgaggtcataggcgatgttgacgagccgctggtctccagagagtttcatgaccagcatgaaggggattagctgcttgccaaaggaccccatccaggtgtaggtttccacatcgtaggtgagaaagagcctttctgtgcgaggatgagagccaatcgggaagaactggatctcctgccaccagttggaggaatggctgttgatgtgatggaagtagaactccctgcgacgcgccgagcattcatgcttgtgcttgtacagacggccgcagtagtcgcagcgttgcacgggttgtatctcgtgaatgagttgtacctggcttcccttgacgagaaatttcagtgggaagccgaggcctggcgattgtatctcgtgctttactatgttgtctgcatcggcctgttcatcttctgtctcgatggtggtcatgctgacgagccctcgcgggaggcaagtccagacctcggcgcggcaggggcggagctcgaggacgagagcgcgcaggctggagctgtccagggtcctgagacgctgcggactcaggttagtaggcagtgtcaggagattaacttgcatgatcttttggagggcgtgcgggaggttcagatagtacttgatctcaacgggtccgttggtggagatgtcgatggcttgcagggttccgtgtcccttgggcgctaccaccgtgcccttgtttttcattttggacggcggtggctctgttgcttcttgcatgtttagaagcggtgtcgagggcgcgcaccgggcggcaggggcggctcgggacccggcggcatggctggcagtggtacgtcggcgccgcgcgcgggtaggttctggtactgcgccctgagaagactcgcatgcgcgacgacgcggcggttgacatcctggatctgacgcctctgggtgaaagctaccggccccgtgagcttgaacctgaaagagagttcaacagaatcaatctcggtatcgttgacggcggcttgcctaaggatttcttgcacgtcaccagagttgtcctggtaggcgatctccgccatgaactgctcgatctcttcctcttgaagatctccgcggcccgctctctcgacggtggccgcgaggtcgttggagatgcgcccaatgagttgagagaatgcattcatgcccgcctcgttccagacgcggctgtagaccacggcccccacgggatctctcgcgcgcatgaccacctgggcgaggttgagctccacgtggcgggtgaagaccgcatagttgcataggcgctggaaaaggtagttgagtgtggtggcgatgtgctcggtgacgaagaaatacatgatccatcgtctcagcggcatctcgctgacatcgcccagagcttccaagcgctccatggcctcgtagaagtccacggcaaaattaaaaaactgggagtttcgcgcggacacggtcaactcctcttccagaagacggataagttcggcgatggtggtgcgcacctcgcgctcgaaagcccctgggatttcttcctcaatctcttcttcttccactaacatctcttcctcttcaggtggggctgcaggaggagggggaacgcggcgacgccggcggcgcacgggcagacggtcgatgaatctttcaatgacctctccgcggcggcggcgcatggtttcagtgacggcgcggccgttctcgcgcggtcgcagagtaaaaacaccgccgcgcatctccttaaagtggtgactgggaggttctccgtttgggagggagagggcgctgattatacattttattaattggcccgtagggactgcacgcagagatctgatcgtgtcaagatccacgggatctgaaaacctttcgacgaaagcgtctaaccagtcacagtcacaaggtaggctgagtacggcttcttgtgggcgggggtggttatgtgttcggtctgggtcttctgtttcttcttcatctcgggaaggtgagacgatgctgctggtgatgaaattaaagtaggcagttctaagacggcggatggtggcgaggagcaccaggtctttgggtccggcttgctggatacgcaggcgattggccattccccaagcattatcctgacatctagcaagatctttgtagtagtcttgcatgagccgttctacgggcacttcttcctcacccgttctgccatgcatacgtgtgagtccaaatccgcgcattggttgtaccagtgccaagtcagctacgactctttcggcgaggatggcttgctgtacttgggtaagggtggcttgaaagtcatcaaaatccacaaagcggtggtaagctcctgtattaatggtgtaagcacagttggccatgactgaccagttaactgtctggtgaccagggcgcacgagctcggtgtatttaaggcgcgaataggcgcgggtgtcaaagatgtaatcgttgcaggtgcgcaccagatactggtaccctataagaaaatgcggcggtggttggcggtagagaggccatcgttctgtagctggagcgccaggggcgaggtcttccaacataaggcggtgatagccgtagatgtacctggacatccaggtgattcctgcggcggtagtagaagcccgaggaaactcgcgtacgcggttccaaatgttgcgtagcggcatgaagtagttcattgtaggcacggtttgaccagtgaggcgcgcgcagtcattgatgctctatagacacggagaaaatgaaagcgttcagcgactcgactccgtagcctggaggaacgtgaacgggttgggtcgcggtgtaccccggttcgagacttgtactcgagccggccggagccgcggctaacgtggtattggcactcccgtctcgacccagcctacaaaaatccaggatacggaatcgagtcgttttgctggtttccgaatggcagggaagtgagtcctattttttttttttgccgctcagatgcatcccgtgctgcgacagatgcgcccccaacaacagcccccctcgcagcagcagcagcagcaatcacaaaaggctgtccctgcaactactgcaactgccgccgtgagcggtgcgggacagcccgcctatgatctggacttggaagagggcgaaggactggcacgtctaggtgcgccttcacccgagcggcatccgcgagttcaactgaaaaaagattctcgcgaggcgtatgtgccccaacagaacctatttagagacagaagcggcgaggagccggaggagatgcgagcttcccgctttaacgcgggtcgtgagctgcgtcacggtttggaccgaagacgagtgttgcgggacgaggatttcgaagttgatgaaatgacagggatcagtcctgccagggcacacgtggctgcagccaaccttgtatcggcttacgagcagacagtaaaggaagagcgtaacttccaaaagtcttttaataatcatgtgcgaaccctgattgcccgcgaagaagttacccttggtttgatgcatttgtgggatttgatggaagctatcattcagaaccctactagcaaacctctgaccgcccagctgtttctggtggtgcaacacagcagagacaatgaggctttcagagaggcgctgctgaacatcaccgaacccgaggggagatggttgtatgatcttatcaacattctacagagtatcatagtgcaggagcggagcctgggcctggccgagaaggtggctgccatcaattactcggttttgagcttgggaaaatattacgctcgcaaaatctacaagactccatacgttcccatagacaaggaggtgaagatagatgggttctacatgcgcatgacgctcaaggtcttgaccctgagcgatgatcttggggtgtatcgcaatgacagaatgcatcgcgcggttagcgccagcaggaggcgcgagttaagcgacagggaactgatgcacagtttgcaaagagctctgactggagctggaaccgagggtgagaattacttcgacatgggagctgacttgcagtggcagcctagtcgcagggctctgagcgccgcgacggcaggatgtgagcttccttacatagaagaggcggatgaaggcgaggaggaagagggcgagtacttggaagactgatggcacaacccgtgttttttgctagatggaacagcaagcaccggatcccgcaatgcgggcggcgctgcagagccagccgtccggcattaactcctcggacgattggacccaggccatgcaacgtatcatggcgttgacgactcgcaaccccgaagcctttagacagcaaccccaggccaaccgtctatcggccatcatggaagctgtagtgccttcccgctctaatcccactcatgagaaggtcctggccatcgtgaacgcgttggtggagaacaaagctattcgtccagatgaggccggactggtatacaacgctctcttagaacgcgtggctcgctacaacagtagcaatgtgcaaaccaatttggaccgtatgataacagatgtacgcgaagccgtgtctcagcgcgaaaggttccagcgtgatgccaacctgggttcgctggtggcgttaaatgctttcttgagtactcagcctgctaatgtgccgcgtggtcaacaggattatactaactttttaagtgctttgagactgatggtatcagaagtacctcagagcgaagtgtatcagtccggtcctgattacttctttcagactagcagacagggcttgcagacggtaaatctgagccaagcttttaaaaaccttaaaggtttgtggggagtgcatgccccggtaggagaaagagcaaccgtgtctagcttgttaactccgaactcccgcctattattactgttggtagctcctttcaccgacagcggtagcatcgaccgtaattcctatttgggttacctactaaacctgtatcgcgaagccatagggcaaagtcaggtggacgagcagacctatcaagaaattacccaagtcagtcgcgctttgggacaggaagacactggcagtttggaagccactctgaacttcttgcttaccaatcggtctcaaaagatccctcctcaatatgctcttactgcggaggaggagaggatccttagatatgtgcagcagagcgtgggattgtttctgatgcaagagggggcaactccgactgcagcactggacatgacagcgcgaaatatggagcccagcatgtatgccagtaaccgacctttcattaacaaactgctggactacttgcacagagctgccgctatgaactctgattatttcaccaatgccatcttaaacccgcactggctgcccccacctggtttctacacgggcgaatatgacatgcccgaccctaatgacggatttctgtgggacgacgtggacagcgatgttttttcacctctttctgatcatcgcacgtggaaaaaggaaggcggcgatagaatgcattcttctgcatcgctgtccggggtcatgggtgctaccgcggctgagcccgagtctgcaagtccttttcctagtctacccttttctctacacagtgtacgtagcagcgaagtgggtagaataagtcgcccgagtttaatgggcgaagaggagtatctaaacgattccttgctcagaccggcaagagaaaaaaatttcccaaacaatggaatagaaagtttggtggataaaatgagtagatggaagacttatgctcaggatcacagagacgagcctgggatcatggggattacaagtagagcgagccgtagacgccagcgccatgacagacagaggggtcttgtgtgggacgatgaggattcggccgatgatagcagcgtgctggacttgggtgggagaggaaggggcaacccgtttgctcatttgcgccctcgcttgggtggtatgttgtaaaaaaaaataaaaaaaaaactcaccaaggccatggcgacgagcgtacgttcgttcttctttattatctgtgtctagtataatgaggcgagtcgtgctaggcggagcggtggtgtatccggagggtcctcctccttcgtacgagagcgtgatgcagcagcagcaggcgacggcggtgatgcaatccccactggaggctccctttgtgcctccgcgatacctggcacctacggagggcagaaacagcattcgttattcggaactggcacctcagtacgataccaccaggttgtatctggtggacaacaagtcggcggacattgcttctctgaactatcagaatgaccacagcaacttcttgaccacggtggtgcaaaacaatgactttacccctacggaagccagcacccagaccattaactttgatgaacgatcgcggtggggcggtcagctaaagaccatcatgcatactaacatgccaaacgtgaacgagtatatgtttagtaacaagttcaaagcgcgtgtgatggtgtccagaaaacctcccgacggtgctgcagttggggatacttatgatcacaagcaggatattttgaaatatgagtggttcgagtttactttgccagaaggcaacttttcagttactatgactattgatttgatgaacaatgccatcatagataattacttgaaagtgggtagacagaatggagtgcttgaaagtgacattggtgttaagttcgacaccaggaacttcaagctgggatgggatcccgaaaccaagttgatcatgcctggagtgtatacgtatgaagccttccatcctgacattgtcttactgcctggctgcggagtggattttaccgagagtcgtttgagcaaccttcttggtatcagaaaaaaacagccatttcaagagggttttaagattttgtatgaagatttagaaggtggtaatattccggccctcttggatgtagatgcctatgagaacagtaagaaagaacaaaaagccaaaatagaagctgctacagctgctgcagaagctaaggcaaacatagttgccagcgactctacaagggttgctaacgctggagaggtcagaggagacaattttgcgccaacacctgttccgactgcagaatcattattggccgatgtgtctgaaggaacggacgtgaaactcactattcaacctgtagaaaaagatagtaagaatagaagctataatgtgttggaagacaaaatcaacacagcctatcgcagttggtatctttcgtacaattatggcgatcccgaaaaaggagtgcgttcctggacattgctcaccacctcagatgtcacctgcggagcagagcaggtctactggtcgcttccagacatgatgaaggatcctgtcactttccgctccactagacaagtcagtaactaccctgtggtgggtgcagagcttatgcccgtcttctcaaagagcttctacaacgaacaagctgtgtactcccagcagctccgccagtccacctcgcttacgcacgtcttcaaccgctttcctgagaaccagattttaatccgtccgccggcgcccaccattaccaccgtcagtgaaaacgttcctgctctcacagatcacgggaccctgccgttgcgcagcagtatccggggagtccaacgtgtgaccgttactgacgccagacgccgcacctgtccctacgtgtacaaggcactgggcatagtcgcaccgcgcgtcctttcaagccgcactttctaaaaaaaaaaaaaatgtccattcttatctcgcccagtaataacaccggttggggtctgcgcgctccaagcaagatgtacggaggcgcacgcaaacgttctacccaacatcctgtccgtgttcgcggacattttcgcgctccatggggcgccctcaagggccgcactcgcgttcgaaccaccgtcgatgatgtaatcgatcaggtggttgccgacgcccgtaattatactcctactgcgcctacatctactgtggatgcagttattgacagtgtagtggctgacgctcgcaactatgctcgacgtaagagccggcgaaggcgcattgccagacgccaccgagctaccactgccatgcgagccgcaagagctctgctacgaagagctagacgcgtggggcgaagagccatgcttagggcggccagacgtgcagcttcgggcgccagcgccggcaggtcccgcaggcaagcagccgctgtcgcagcggcgactattgccgacatggcccaatcgcgaagaggcaatgtatactgggtgcgtgacgctgccaccggtcaacgtgtacccgtgcgcacccgtccccctcgcacttagaagatactgagcagtctccgatgttgtgtcccagcggcgaggatgtccaagcgcaaatacaaggaagaaatgctgcaggttatcgcacctgaagtctacggccaaccgttgaaggatgaaaaaaaaccccgcaaaatcaagcgggttaaaaaggacaaaaaagaagaggaagatggcgatgatgggctggcggagtttgtgcgcgagtttgccccacggcgacgcgtgcaatggcgtgggcgcaaagttcgacatgtgttgagacctggaacttcggtggtctttacacccggcgagcgttcaagcgctacttttaagcgttcctatgatgaggtgtacggggatgatgatattcttgagcaggcggctgaccgattaggcgagtttgcttatggcaagcgtagtagaataacttccaaggatgagacagtgtcgatacccttggatcatggaaatcccacccctagtcttaaaccggtcactttgcagcaagtgttacccgtaactccgcgaacaggtgttaaacgcgaaggtgaagatttgtatcccactatgcaactgatggtacccaaacgccagaagttggaggacgttttggagaaagtaaaagtggatccagatattcaacctgaggttaaagtgagacccattaagcaggtagcgcctggtctgggggtacaaactgtagacattaagattcccactgaaagtatggaagtgcaaactgaacccgcaaagcctactgccacctccactgaagtgcaaacggatccatggatgcccatgcctattacaactgacgccgccggtcccactcgaagatcccgacgaaagtacggtccagcaagtctgttgatgcccaattatgttgtacacccatctattattcctactcctggttaccgaggcactcgctactatcgcagccgaaacagtacctcccgccgtcgccgcaagacacctgcaaatcgcagtcgtcgccgtagacgcacaagcaaaccgactcccggcgccctggtgcggcaagtgtaccgcaatggtagtgcggaacctttgacactgccgcgtgcgcgttaccatccgagtatcatcacttaatcaatgttgccgctgcctccttgcagatatggccctcacttgtcgccttcgcgttcccatcactggttaccgaggaagaaactcgcgccgtagaagagggatgttgggacgcggaatgcgacgctacaggcgacggcgtgctatccgcaagcaattgcggggtggttttttaccagccttaattccaattatcgctgctgcaattggcgcgataccaggcatagcttccgtggcggttcaggcctcgcaacgacattgacattggaaaaaaacgtataaataaaaaaaaaaaaatacaatggactctgacactcctggtcctgtgactatgttttcttagagatggaagacatcaatttttcatccttggctccgcgacacggcacgaagccgtacatgggcacctggagcgacatcggcacgagccaactgaacgggggcgccttcaattggagcagtatctggagcgggcttaaaaattttggctcaaccataaaaacatacgggaacaaagcttggaacagcagtacaggacaggcgcttagaaataaacttaaagaccagaacttccaacaaaaagtagtcgatgggatagcttccggcatcaatggagtggtagatttggctaaccaggctgtgcagaaaaagataaacagtcgtttggacccgccgccagcaaccccaggtgaaatgcaagtggaggaagaaattcctccgccagaaaaacgaggcgacaagcgtccgcgtcccgatttggaagagacgctggtgacgcgcgtagatgaaccgccttcttatgaggaagcaacgaagcttggaatgcccaccactagaccgatagccccaatggccaccggggtgatgaaaccttctcagttgcatcgacccgtcaccttggatttgccccctccccctgctgctactgctgtacccgcttctaagcctgtcgctgccccgaaaccagtcgccgtagccaggtcacgtcccgggggcgctcctcgtccaaatgcgcactggcaaaatactctgaacagcatcgtgggtctaggcgtgcaaagtgtaaaacgccgtcgctgcttttaattaaatatggagtagcgcttaacttgcctatctgtgtatatgtgtcattacacgccgtcacagcagcagaggaaaaaaggaagaggtcgtgcgtcgacgctgagttactttcaagatggccaccccatcgatgctgccccaatgggcatacatgcacatcgccggacaggatgcttcggagtacctgagtccgggtctggtgcagttcgcccgcgccacagacacctacttcaatctgggaaataagtttagaaatcccaccgtagcgccgacccacgatgtgaccaccgaccgtagccagcggctcatgttgcgcttcgtgcccgttgaccgggaggacaatacatactcttacaaagtgcggtacaccctggccgtgggcgacaacagagtgctggatatggccagcacgttctttgacattaggggtgtgttggacagaggtcccagtttcaaaccctattctggtacggcttacaactccctggctcctaaaggcgctccaaatacatctcagtggattgcagaaggtgtaaaaaatacaactggtgaggaacacgtaacagaagaggaaaccaatactactacttacacttttggcaatgctcctgtaaaagctgaagctgaaattacaaaagaaggactcccagtaggtttggaagtttcagatgaagaaagtaaaccgatttatgctgataaaacatatcagccagaacctcagctgggagatgaaacttggactgaccttgatggaaaaaccgaaaagtatggaggcagggctctcaaacccgatactaagatgaaaccatgctacgggtcctttgccaaacctactaatgtgaaaggcggtcaggcaaaacaaaaaacaacggagcagccaaatcagaaagtcgaatatgatatcgacatggagttttttgatgcggcatcgcagaaaacaaacttaagtcctaaaattgtcatgtatgcagaaaatgtaaatttggaaactccagacactcatgtagtgtacaaacctggaacagaagacacaagttccgaagctaatttgggacaacaatctatgcccaacagacccaactacattggcttcagagataactttattggacttatgtactataacagtactggtaacatgggggtgctggctggtcaagcgtctcagttaaatgcagtggttgacttgcaggacagaaacacagaactttcttaccaactcttgcttgactctctgggcgacagaaccagatactttagcatgtggaatcaggctgtggacagttatgatcctgatgtacgtgttattgaaaatcatggtgtggaagatgaacttcccaactactgttttccactggacggcataggtgttccaacaaccagttacaaatcaatagttccaaatggagacaatgcgcctaattggaaggaacctgaagtaaatggaacaagtgagatcggacagggtaatttgtttgccatggaaattaaccttcaagccaatctatggcgaagtttcctttattccaatgtggctctatatctcccagactcgtacaaatacaccccgtccaatgtcactcttccagaaaacaaaaacacctacgactacatgaacgggcgggtggtgccgccatctctagtagacacctatgtgaacattggtgccaggtggtctctggatgccatggacaatgtcaacccattcaaccaccaccgtaacgctggcttgcgttaccgatccatgcttctgggtaacggacgttatgtgcctttccacatacaagtgcctcaaaaattcttcgctgttaaaaacctgctgcttctcccaggctcctacacttatgagtggaactttaggaaggatgtgaacatggttctacagagttccctcggtaacgacctgcgggtagatggcgccagcatcagtttcacgagcatcaacctctatgctacttttttccccatggctcacaacaccgcttccacccttgaagccatgctgcggaatgacaccaatgatcagtcattcaacgactacctatctgcagctaacatgctctaccccattcctgccaatgcaaccaatattcccatttccattccttctcgcaactgggcggctttcagaggctggtcatttaccagactgaaaaccaaagaaactccctctttggggtctggatttgacccctactttgtctattctggttctattccctacctggatggtaccttctacctgaaccacacttttaagaaggtttccatcatgtttgactcttcagtgagctggcctggaaatgacaggttactatctcctaacgaatttgaaataaagcgcactgtggatggcgaaggctacaacgtagcccaatgcaacatgaccaaagactggttcttggtacagatgctcgccaactacaacatcggctatcagggcttctacattccagaaggatacaaagatcgcatgtattcatttttcagaaacttccagcccatgagcaggcaggtggttgatgaggtcaattacaaagacttcaaggccgtcgccataccctaccaacacaacaactctggctttgtgggttacatggctccgaccatgcgccaaggtcaaccctatcccgctaactatccctatccactcattggaacaactgccgtaaatagtgttacgcagaaaaagttcttgtgtgacagaaccatgtggcgcataccgttctcgagcaacttcatgtctatgggggcccttacagacttgggacagaatatgctctatgccaactcagctcatgctctggacatgacctttgaggtggatcccatggatgagcccaccctgctttatcttctcttcgaagttttcgacgtggtcagagtgcatcagccacaccgcggcatcatcgaggcagtctacctgcgtacaccgttctcggccggtaacgctaccacgtaagaagcttcttgcttcttgcaaatagcagctgcaaccatggcctgcggatcccaaaacggctccagcgagcaagagctcagagccattgtccaagacctgggttgcggaccctattttttgggaacctacgataagcgcttcccggggttcatggcccccgataagctcgcctgtgccattgtaaatacggccggacgtgagacggggggagagcactggttggctttcggttggaacccacgttctaacacctgctacctttttgatccttttggattctcggatgatcgtctcaaacagatttaccagtttgaatatgagggtctcctgcgccgcagcgctcttgctaccaaggaccgctgtattacgctggaaaaatctacccagaccgtgcagggtccccgttctgccgcctgcggacttttctgctgcatgttccttcacgcctttgtgcactggcctgaccgtcccatggacggaaaccccaccatgaaattgctaactggagtgccaaacaacatgcttcattctcctaaagtccagcccaccctgtgtgacaatcaaaaagcactctaccattttcttaatacccattcgccttattttcgctcccatcgtacacacatcgaaagggccactgcgttcgaccgtatggatgttcaataatgactcatgtaaacaacgtgttcaataaacatcactttatttttttacatgtatcaaggctctgcattacttatttatttacaagtcgaatgggttctgacgagaatcagaatgacccgcaggcagtgatacgttgcggaactgatacttgggttgccacttgaattcgggaatcaccaacttgggaaccggtatatcgggcaggatgtcactccacagctttctggtcagctgcaaagctccaagcaggtcaggagccgaaatcttgaaatcacaattaggaccagtgctttgagcgcgagagttgcggtacaccggattgcagcactgaaacaccatcagcgacggatgtctcacgcttgccagcacggtgggatctgcaatcatgcccacatccagatcttcagcattggcaatgctgaacggggtcatcttgcaggtctgcctacccatggcgggcacccaattaggcttgtggttgcaatcgcagtgcagggggatcagtatcatcttggcctgatcctgtctgattcctggatacacggctctcatgaaagcatcatattgcttgaaagcctgctgggctttactaccctcggtataaaacatcccgcaggacctgctcgaaaactggttagctgcacagccggcatcattcacacagcagcgggcgtcattgttagctatttgcaccacacttctgccccagcggttttgggtgattttggttcgctcgggattctcctttaaggctcgttgtccgttctcgctggccacatccatctcgataatctgctccttctgaatcataatattgccatgcaggcacttcagcttgccctcataatcattgcagccatgaggccacaacgcacagcctgtacattcccaattatggtgggcgatctgagaaaaagaatgtatcattccctgcagaaatcttcccatcatcgtgctcagtgtcttgtgactagtgaaagttaactggatgcctcggtgctcctcgtttacgtactggtgacagatgcgcttgtattgttcgtgttgctcaggcattagtttaaaagaggttctaagttcgttatccagcctgtacttctccatcagcagacacatcacttccatgcctttctcccaagcagacaccaggggcaagctaatcggattcttaacagtgcaggcagcagctcctttagccagagggtcatctttagcgatcttctcaatgcttcttttgccatccttctcaacgatgcgcacgggcgggtagctgaaacccactgctacaagttgcgcctcttctctttcttcttcgctgtcttgactgatgtcttgcatggggatatgtttggtcttccttggcttctttttggggggtatcggaggaggaggactgtcgctccgttccggagacagggaggattgtgacgtttcgctcaccattaccaactgactgtcggtagaagaacctgaccccacacggcgacaggtgtttctcttcgggggcagaggtggaggcgattgcgaagggctgcggtccgacctggaaggcggatgactggcagaaccccttccgcgttcgggggtgtgctccctgtggcggtcgcttaactgatttccttcgcggctggccattgtgttctcctaggcagagaaacaacagacatggaaactcagccattgctgtcaacatcgccacgagtgccatcacatctcgtcctcagcgacgaggaaaaggagcagagcttaagcattccaccgcccagtcctgccaccacctctaccctagaagataaggaggtcgacgcatctcatgacatgcagaataaaaaagcgaaagagtctgagacagacatcgagcaagacccgggctatgtgacaccggtggaacacgaggaagagttgaaacgctttctagagagagaggatgaaaactgcccaaaacaacgagcagataactatcaccaagatgctggaaatagggatcagaacaccgactacctcatagggcttgacggggaagacgcgctccttaaacatctagcaagacagtcgctcatagtcaaggatgcattattggacagaactgaagtgcccatcagtgtggaagagctcagccgcgcctacgagcttaacctcttttcacctcgtactccccccaaacgtcagccaaacggcacctgcgagccaaatcctcgcttaaacttttatccagcttttgctgtgccagaagtactggctacctatcacatcttttttaaaaatcaaaaaattccagtctcctgccgcgctaatcgcacccgcgccgatgccctactcaatctgggacctggttcacgcttacctgatatagcttccttggaagaggttccaaagatcttcgagggtctgggcaataatgagactcgggccgcaaatgctctgcaaaagggagaaaatggcatggatgagcatcacagcgttctggtggaattggaaggcgataatgccagactcgcagtactcaagcgaagcatcgaggtcacacacttcgcatatcccgctgtcaacctgccccctaaagtcatgacggcggtcatggaccagttactcattaagcgcgcaagtcccctttcagaagacatgcatgacccagatgcctgtgatgagggtaaaccagtggtcagtgatgagcagctaacccgatggctgggcaccgactctcccagggatttggaagagcgtcgcaagcttatgatggccgtggtgctggttaccgtagaactagagtgtctccgacgtttctttaccgattcagaaaccttgcgcaaactcgaagagaatctgcactacacttttagacacggctttgtgcggcaggcatgcaagatatctaacgtggaactcaccaacctggtttcctacatgggtattctgcatgagaatcgcctaggacaaagcgtgctgcacagcaccctgaagggggaagcccgccgtgattacatccgcgattgtgtctatctgtacctgtgccacacgtggcaaaccggcatgggtgtatggcagcaatgtttagaagaacagaacttgaaagagcttgacaagctcttacagaaatctcttaaggttctgtggacagggttcgacgagcgcaccgtcgcttccgacctggcagacctcatcttcccagagcgtctcagggttactttgcgaaacggattgcctgactttatgagccagagcatgcttaacaattttcgctctttcatcctggaacgctccggtatcctgcccgccacctgctgcgcactgccctccgactttgtgcctctcacctaccgcgagtgccccccgccgctatggagtcactgctacctgttccgtctggccaactatctctcctaccactcggatgtgatcgaggatgtgagcggagacggcttgctggagtgtcactgccgctgcaatctgtgcacgccccaccggtccctagcttgcaacccccagttgatgagcgaaacccagataataggcacctttgaattgcaaggccccagcagccaaggcgatgggtcttctcctgggcaaagtttaaaactgaccccgggactgtggacctccgcctacttgcgcaagtttgctccggaagattaccacccctatgaaatcaagttctatgaggaccaatcacagcctccaaaggccgaactttcggcctgcgtcatcacccagggggcaattctggcccaattgcaagccatccaaaaatcccgccaagaatttctactgaaaaagggtaagggggtctaccttgacccccagaccggcgaggaactcaacacaaggttccctcaggatgtcccaacgacgagaaaacaagaagttgaaggtgcagccgccgcccccagaagatatggaggaagattgggacagtcaggcagaggaggcggaggaggacagtctggaggacagtctggaggaagacagtttggaggaggaaaacgaggaggcagaggaggtggaagaagtaaccgccgacaaacagttatcctcggctgcggagacaagcaacagcgctaccatctccgctccgagtcgaggaacccggcggcgtcccagcagtagatgggacgagaccggacgcttcccgaacccaaccagcgcttccaagaccggtaagaaggatcggcagggatacaagtcctggcgggggcataagaatgccatcatctcctgcttgcatgagtgcgggggcaacatatccttcacgcggcgctacttgctattccaccatggggtgaactttccgcgcaatgttttgcattactaccgtcacctccacagcccctactatagccagcaaatcccggcagtctcgacagataaagacagcggcggcgacctccaacagaaaaccagcagcggcagttagaaaatacacaacaagtgcagcaacaggaggattaaagattacagccaacgagccagcgcaaacccgagagttaagaaatcggatctttccaaccctgtatgccatcttccagcagagtcggggtcaagagcaggaactgaaaataaaaaaccgatctctgcgttcgctcaccagaagttgtttgtatcacaagagcgaagatcaacttcagcgcactctcgaggacgccgaggctctcttcaacaagtactgcgcgctgactcttaaagagtaggcagcgaccgcgcttattcaaaaaaggcgggaattacatcatcctcgacatgagtaaagaaattcccacgccttacatgtggagttatcaaccccaaatgggattggcggcaggcgcctcccaggactactccacccgcatgaattggctcagcgccgggccttctatgatttctcgagttaatgatatacgcgcctaccgaaaccaaatacttttggaacagtcagctcttaccaccacgccccgccaacaccttaatcccagaaattggcccgccgccctagtgtaccaggaaagtcccgctcccaccactgtattacttcctcgagacgcccaggccgaagtccaaatgactaatgcaggtgcgcagttagctggcggctccaccctatgtcgtcacaggcctcggcataatataaaacgcctgatgatcagaggccgaggtatccagctcaacgacgagtcggtgagctctccgcttggtctacgaccagacggaatctttcagattgccggctgcgggagatcttccttcacccctcgtcaggctgttctgactttggaaagttcgtcttcgcaaccccgctcgggcggaatcgggaccgttcaatttgtggaggagtttactccctctgtctacttcaaccccttctccggatctcctgggcattacccggacgagttcataccgaacttcgacgcgattagcgagtcagtggacggctacgattgatgtctggtgacgcggctgagctatctcggctgcgacatctagaccactgccgccgctttcgctgctttgcccgggaactcattgagttcatctacttcgaactccccaaggatcaccctcaaggtccggcccacggagtgcggatttctatcgaaggcaaaatagactctcgcctgcaacgaattttctcccagcggcccgtgctgatcgagcgagaccagggaaacaccacggtttccatctactgcatttgtaatcaccccggattgcatgaaagcctttgctgtcttatgtgtactgagtttaataaaaactgaattaagactctcctacggactgccgcttcttcaacccggattttacaaccagaagaacgaaacttttcctgtcgtccaggactctgttaacttcacctttcctactcacaaactagaagctcaacgactacaccgcttttccagaagcattttccctactaatactactttcaaaaccggaggtgagctccaaggtcttcctacagaaaacccttgggtggaagcgggccttgtagtgctaggaattcttgcgggtgggcttgtgattattctttgctacctatacacaccttgcttcactttcttagtggtgttgtggtattggtttaaaaaatggggcccatactagtcttgcttgttttactttcgcttttggaaccgggttctgccaattacgatccatgtctagacttcgacccagaaaactgcacacttacttttgcacccgacacaagccgcatctgtggagttcatcgcctctcttacgaacttggcccccaacgacaaaaatttacctgcatggtgggaatcaaccccatagttatcacccagcaaagtggagatactaagggttgcattcactgctcctgcgattccatcgagtgcacctacaccctgctgaagaccctatgcggcctaagagacctgctaccaatgaattaaaaaatgattaataaaaaatcacttacttgaaatcagcaataaggtctctgttgaaattttctcccagcagcacctcacttccctcttcccaactctggtattctaaaccccgttcagcggcatactttctccatactttaaaggggatgtcaaattttagctcctctcctgtacccacaatcttcatgtctttcttcccagatgaccaagagagtccggctcagtgactccttcaaccctgtctacccctatgaagatgaaagcacctcccaacacccctttataaacccagggtttatttccccaaatggcttcacacaaagcccaaacggagttcttactttaaaatgtttaaccccactaacaaccacaggcggatctctacagctaaaagtgggagggggacttacagtggatgacaccaacggttttttgaaagaaaacataagtgccaccacaccactcgttaagactggtcactctataggtttaccactaggagccggattgggaacgaatgaaaataaactttgtatcaaattaggacaaggacttacattcaattcaaacaacatttgcattgatgacaatattaacaccttatggacaggagtcaaccccaccgaagccaactgtcaaatcatgaactccagtgaatctaatgattgcaaattaattctaacactagttaaaactggagcactagtcactgcatttgtttatgttataggagtatctaacaattttaatatgctaactacacacagaaatataaattttactgcagagctgtttttcgattctactggtaatttactaactagactctcatccctcaaaactccacttaatcataaatcaggacaaaacatggctactggtgccattactaatgctaaaggtttcatgcccagcacgactgcctatcctttcaatgataattctagagaaaaagaaaactacatttacggaacttgttactacacagctagtgatcgcactgcttttcccattgacatatctgtcatgcttaaccgaagagcaataaatgacgagacatcatattgtattcgtataacttggtcctggaacacaggagatgccccagaggtgcaaacctctgctacaaccctagtcacctccccatttaccttttactacatcagagaagacgactgacaaataaagtttgcgatcgccaggcccaccatgtgtcaccagcagttggtcatctcttggttttccctggtttttctggcatctcccctcgtggccatatgggaactgaagaaagatgtttatgtcgtagaattggattggtatccggatgcccctggagaaatggtggtcctcacctgtgacacccctgaagaagatggtatcacctggaccttggaccagagcagtgaggtcttaggctctggcaaaaccctgaccatccaagtcaaagagtttggagatgctggccagtacacctgtcacaaaggaggcgaggttctaagccattcgctcctgctgcttcacaaaaaggaagatggaatttggtccactgatattttaaaggaccagaaagaacccaaaaataagacctttctaagatgcgaggccaagaattattctggacgtttcacctgctggtggctgacgacaatcagtactgatttgacattcagtgtcaaaagcagcagaggctcttctgacccccaaggggtgacgtgcggagctgctacactctctgcagagagagtcagaggggacaacaaggagtatgagtactcagtggagtgccaggaggacagtgcctgcccagctgctgaggagagtctgcccattgaggtcatggtggatgccgttcacaagctcaagtatgaaaactacaccagcagcttcttcatcagggacatcatcaaacctgacccacccaagaacttgcagctgaagccattaaagaattctcggcaggtggaggtcagctgggagtaccctgacacctggagtactccacattcctacttctccctgacattctgcgttcaggtccagggcaagagcaagagagaaaagaaagatagagtcttcacggacaagacctcagccacggtcatctgccgcaaaaatgccagcattagcgtgcgggcccaggaccgctactatagctcatcttggagcgaatgggcatctgtgccctgcagtggagggggcggcagcgggggaggcggcagcggcggcgggggatcgagaaacctccccgtggccactccagacccaggaatgttcccatgccttcaccactcccaaaacctgctgagggccgtcagcaacatgctccagaaggccagacaaactctagaattttacccttgcacttctgaagagattgatcatgaagatatcacaaaagataaaaccagcacagtggaggcctgtttaccattggaattaaccaagaatgagagttgcctaaattccagagagacctctttcataactaatgggagttgcctggcctccagaaagacctcttttatgatggccctgtgccttagtagtatttatgaagacttgaagatgtaccaggtggagttcaagaccatgaatgcaaagcttctgatggatcctaagaggcagatctttctagatcaaaacatgctggcagttattgatgagctgatgcaggccctgaatttcaacagtgagactgtgccacaaaaatcctcccttgaagaaccggatttttataaaactaaaatcaagctctgcatacttcttcatgctttcagaattcgggcagtgactattgatagagtgatgagctatctgaatgcttccggaagcggagctactaacttcagcctgctgaagcaggctggagacgtggaggagaaccctggacctgactggacctggcgcatcctgttcttggtggcagctgctacgggagctcattccaactgggtgaatgtaataagtgatttgaaaaaaattgaagatcttattcaatctatgcatattgatgctactttatatacggaaagtgatgttcaccccagttgcaaagtaacagcaatgaagtgctttctcttggagttacaagttatttcacttgagtccggagatgcaagtattcatgatacagtagaaaatctgatcatcctagcaaacaacagtttgtcttctaatgggaatgtaacagaatctggatgcaaagaatgtgaggaactggaggaaaaaaatattaaagaatttttgcagagttttgtacatattgtccaaatgttcatcaacacttctggaagcggacagtgtactaattatgctctcttgaaattggctggagatgttgagagcaaccctggacctgctcagtcactggctctgagcctccttatcctggttctggcctttggcatccccaggacccaaggcagtgatggaggggctcaggactgttgcctcaagtacagccaaaggaagattcccgccaaggttgtccgcagctaccggaagcaggaaccaagcttaggctgctccatcccagctatcctgttcttgccccgcaagcgctctcaggcagagctatgtgcagacccaaaggagctctgggtgcagcagctgatgcagcatctggacaagacaccatccccacagaaaccagcccagggctgcaggaaggacaggggggcctccaagactggcaagaaaggaaagggctccaaaggctgcaagaggactgagcggtcacagacccctaaagggccaggaagcggagtgaaacagactttgaattttgaccttctcaagttggcgggagacgtggagtccaaccctggacctaagaaaagtggtgttcttttcctcttgggcatcatcttgctggttctgattggagtgcaaggaaccccagtagtgagaaagggtcgctgttcctgcatcagcaccaaccaagggactatccacctacaatccttgaaagaccttaaacaatttgccccaagcccttcctgcgagaaaattgaaatcattgctacactgaagaatggagttcaaacatgtctaaacccagattcagcagatgtgaaggaactgattaaaaagtgggagaaacaggtcagccaaaagaaaaagcaaaagaatgggaaaaaacatcaaaaaaagaaagttctgaaagttcgaaaatctcaacgttctcgtcaaaagaagactacaggaagcggagagggcagaggaagtctgctaacatgcggtgacgtcgaggagaatcctggacctgccttgacctttgctttactggtggccctcctggtgctcagctgcaagtcaagctgctctgtgggctgtgatctgcctcaaacccacagcctgggtagcaggaggaccttgatgctcctggcacagatgaggagaatctctcttttctcctgcttgaaggacagacatgactttggatttccccaggaggagtttggcaaccagttccaaaaggctgaaaccatccctgtcctccatgagatgatccagcagatcttcaatctcttcagcacaaaggactcatctgctgcttgggatgagaccctcctagacaaattctacactgaactctaccagcagctgaatgacctggaagcctgtgtgatacagggggtgggggtgacagagactcccctgatgaaggaggactccattctggctgtgaggaaatacttccaaagaatcactctctatctgaaagagaagaaatacagcccttgtgcctgggaggttgtcagagcagaaatcatgagatctttttctttgtcaacaaacttgcaagaaagtttaagaagtaaggaataagctagcttgactgactgagatacagcgtaccttcagctcacagacatgataagatacattgatgagtttggacaaaccacaactagaatgcagtgaaaaaaatgctttatttgtgaaatttgtgatgctattgctttatttgtaaccattataagctgcaataaacaagttaacaacaacaattgcattcattttatgtttcaggttcagggggaggtgtgggaggttttttaaagcaagtaaaacctctacaaatgtggtagtcgtcagctatcctgcaggaacttgtttatttgaaaatcaattcacaaaatccgagtagttattttgcctcccccttcccatttaacagaatacaccaatctctccccacgcacagctttaaacatttggataccattagatatagacatggttttagattccacattccaaacagtttcagagcgagccaatctggggtcagtgatagataaaaatccatcgggatagtcttttaaagcgctttcacagtccaactgctgcggatgcgactccggagtctggatcacggtcatctggaagaagaacgatgggaatcataatccgaaaacggtatcggacgattgtgtctcatcaaacccacaagcagccgctgtctgcgtcgctccgtgcgactgctgtttatgggatcagggtccacagtgtcctgaagcatgattttaatagcccttaacatcaactttctggtgcgatgcgcgcagcaacgcattctgatttcactcaaatctttgcagtaggtacaacacattattacaatattgtttaataaaccataattaaaagcgctccagccaaaactcatatctgatataatcgcccctgcatgaccatcataccaaagtttaatataaattaaatgacgttccctcaaaaacacactacccacatacatgatctcttttggcatgtgcatattaacaatctgtctgtaccatggacaacgttggttaatcatgcaacccaatataaccttccggaaccacactgccaacaccgctcccccagccatgcattgaagtgaaccctgctgattacaatgacaatgaagaacccaattctctcgaccgtgaatcacttgagaatgaaaaatatctatagtggcacaacatagacataaatgcatgcatcttctcataatttttaactcctcaggatttagaaacatatcccagggaataggaagctcttgcagaacagtaaagctggcagaacaaggaagaccacgaacacaacttacactatgcatagtcatagtatcacaatctggcaacagcgggtggtcttcagtcatagaagctcgggtttcattttcctcacaacgtggtaactgggctctggtgtaagggtgatgtctggcgcatgatgtcgagcgtgcgcgcaaccttgtcataatggagttgcttcctgacattctcgtattttgtatagcaaaacgcggccctggcagaacacactcttcttcgccttctatcctgccgcttagcgtgttccgtgtgatagttcaagtacaaccacactcttaagttggtcaaaagaatgctggcttcagttgtaatcaaaactccatcgcatctaatcgttctgaggaaatcatccaagcaatgcaactggattgtgtttcaagcaggagaggagagggaagagacggaagaaccatgttaatttttattccaaacgatctcgcagtacttcaaattgtagatcgcgcagatggcatctctcgcccccactgtgttggtgaaaaagcacagctagatcaaaagaaatgcgattttcaaggtgctcaacggtggcttccagcaaagcctccacgcgcacatccaagaacaaaagaataccaaaagaaggagcattttctaactcctcaatcatcatattacattcctgcaccattcccagataattttcagctttccagccttgaattattcgtgtcagttcttgtggtaaatccaatccacacattacaaacaggtcccggagggcgccctccaccaccattcttaaacacaccctcataatgacaaaatatcttgctcctgtgtcacctgtagcgaattgagaatggcaacatcaattgacatgcccttggctctaagttcttctttaagttctagttgtaaaaactctctcatattatcaccaaactgcttagccagaagccccccgggaacaagagcaggggacgctacagtgcagtacaagcgcagacctccccaattggctccagcaaaaacaagattggaataagcatattgggaaccgccagtaatatcatcgaagttgctggaaatataatcaggcagagtttcttgtaaaaattgaataaaagaaaaatttgccaaaaaaacattcaaaacctctgggatgcaaatgcaataggttaccgcgctgcgctccaacattgttagttttgaattagtctgcaaaaataaaaaaaaaaacaagcgtcatatcatagtagcctgacgaacagatggataaatcagtctttccatcacaagacaagccacagggtctccagctcgaccctcgtaaaacctgtcatcatgattaaacaacagcaccgaaagttcctcgcggtgaccagcatgaataattcttgatgaagcatacaatccagacatgttagcatcagttaacgagaaaaaacagccaacatagcctttgggtataattatgcttaatcgtaagtatagcaaagccacccctcgcggatacaaagtaaaaggcacaggagaataaaaaatataattatttctctgctgctgttcaggcaacgtcgcccccggtccctctaaatacacatacaaagcctcatcagccatggcttaccagacaaagtacagcgggcacacaaagcacaagctctaaagtgactctccaacctctccacaatatatatatacacaagccctaaactgacgtaatgggagtaaagtgtaaaaaatcccgccaaacccaacacacaccccgaaactgcgtcaccagggaaaagtacagtttcacttccgcaatcccaacaggcgtaacttcctctttctcacggtacgtgatatcccactaacttgcaacgtcattttcccacggtcgcaccgccccttttagccgttaaccccacagccaatcaccacacgatccacactttttaaaatcacctcatttacatattggcaccattccatctataaggtatattatatagataga

SEQ ID NO: 88 - DNA, 36250 bp, Artificial Sequence
  Genome sequence of NG-726 virus
tctatctatataatataccttatagatggaatggtgccaatatgtaaatgaggtgattttaaaaagtgtggatcgtgtggtgattggctgtggggttaacggctaaaaggggcggtgcgaccgtgggaaaatgacgttttgtgggggtggagtttttttgcaagttgtcgcgggaaatgtgacgcataaaaaggcttttttctcacggaactacttagttttcccacggtatttaacaggaaatgaggtagttttgaccggatgcaagtgaaaattgttgattttcgcgcgaaaactgaatgaggaagtgtttttctgaataatgtggtatttatggcagggtggagtatttgttcagggccaggtagactttgacccattacgtggaggtttcgattaccgtgttttttacctgaatttccgcgtaccgtgtcaaagtcttctgtttttacgtaggtgtcagctgatcgctagggtatttatacctcagggtttgtgtcaagaggccactcttgagtgccagcgagaagagttttctcctctgcgccggcagtttaataataaaaaaatgagagatttgcgatttctgcctcaggaaataatctctgctgagactggaaatgaaatattggagcttgtggtgcacgccctgatgggagacgatccggagccacctgtgcagctttttgagcctcctacgcttcaggaactgtatgatttagaggtagagggatcggaggattctaatgaggaagctgtaaatggcttttttaccgattctatgcttttagctgctaatgaagggttagaattagatccgcctttggacacttttgatactccaggggtaattgtggaaagcggtacaggtgtaagaaaattacctgatttgagttccgtggactgtgatttgcactgctatgaagacgggtttcctccgagtgatgaggaggaccatgaaaaggagcagtccatgcagactgcagcgggtgagggagtgaaggctgccaatgttggttttcagttggattgcccggagcttcctggacatggctgtaagtcttgtgaatttcacaggaaaaatactggagtaaaggaactgttatgttcgctttgttatatgagaacgcactgccactttatttacagtaagtgtgtttaagttaaaatttaaaggaatatgctgtttttcacatgtatattgagtgtgagttttgtgcttcttattataggtcctgtgtctgatgctgatgaatcaccatctcctgattctactacctcacctcctgagattcaagcacctgttcctgtggacgtgcgcaagcccattcctgtgaagcttaagcctgggaaacgtccagcagtggaaaaacttgaggacttgttacagggtggggacggacctttggacttgagtacacggaaacgtccaagacaataagtgttccatatccgtgtttacttaaggtgacgtcaatatttgtgtgacagtgcaatgtaataaaaatatgttaactgttcactggtttttattgctttttgggcggggactcaggtatataagtagaagcagacctgtgtggttagctcataggagctggctttcatccatggaggtttgggccattttggaagaccttaggaagactaggcaactgttagagaacgcttcggacggagtctccggtttttggagattctggttcgctagtgaattagctagggtagtttttaggataaaacaggactataaacaagaatttgaaaagttgttggtagattgcccaggactttttgaagctcttaatttgggccatcaggttcactttaaagaaaaagttttatcagttttagacttttcaaccccaggtagaactgctgctgctgtggcttttcttacttttatattagataaatggatcccgcagactcatttcagcaggggatacgttttggatttcatagccacagcattgtggagaacatggaaggttcgcaagatgaggacaatcttaggttactggccagtgcagcctttgggtgtagcgggaatcctgaggcatccaccggtcatgccagcggttctggaggaggaacagcaagaggacaacccgagagccggcctggaccctccagtggaggaggcggagtagctgacttgtctcctgaactgcaacgggtgcttactggatctacgtccactggacgggataggggcgttaagagggagagggcatctagtggtactgatgctagatctgagttggctttaagtttaatgagtcgcagacgtcctgaaaccatttggtggcatgaggttcagaaagagggaagggatgaagtttctgtattgcaggagaaatattcactggaacaggtgaaaacatgttggttggagcctgaggatgattgggaggtggccattaaaaattatgccaagatagctttgaggcctgataaacagtataagattactagacggattaatatccggaatgcttgttacatatctggaaatggggctgaggtggtaatagatactcaagacaaggcagttattagatgctgcatgatggatatgtggcctggggtagtcggtatggaagcagtaacttttgtaaatgttaagtttaggggagatggttataatggaatagtgtttatggccaataccaaacttatattgcatggttgtagcttttttggtttcaacaatacctgtgtagatgcctggggacaggttagtgtacggggatgtagtttctatgcgtgttggattgccacagctggcagaaccaagagtcaattgtctctgaagaaatgcatatttcaaagatgtaacctgggcattctgaatgaaggcgaagcaagggtccgccactgcgcttctacagatactggatgttttattttgattaagggaaatgccagcgtaaagcataacatgatttgcggtgcttccgatgagaggccttatcaaatgctcacttgtgctggtgggcattgtaatatgctggctactgtgcatattgtttcccatcaacgcaaaaaatggcctgtttttgatcacaatgtgatgacgaagtgtaccatgcatgcaggtgggcgtagaggaatgtttatgccttaccagtgtaacatgaatcatgtgaaagtgttgttggaaccagatgccttttccagaatgagcctaacaggaatttttgacatgaacatgcaaatctggaagatcctgaggtatgatgatacgagatcgagggtacgcgcatgcgaatgcggaggcaagcatgccaggttccagccggtgtgtgtagatgtgactgaagatctcagaccggatcatttggttattgcccgcactggagcagagttcggatccagtggagaagaaactgactaaggtgagtattgggaaaactttggggtgggattttcagatggacagattgagtaaaaatttgttttttctgtcttgcagctgtcatgagtggaaacgcttcttttaaggggggagtcttcagcccttatctgacagggcgtctcccatcctgggcaggagttcgtcagaatgttatgggatctactgtggatggaagacccgtccaacccgccaattcttcaacgctgacctatgctactttaagttcttcacctttggacgcagctgcagctgccgccgccgcttctgttgccgctaacactgtgcttggaatgggttactatggaagcatcatggctaattccacttcctctaataacccttctaccctgactcaggacaagttacttgtccttttggcccagctggaggctttgacccaacgtctgggtgaactttctcagcaggtggtcgagttgcgagtacaaactgagtctgctgtcggcacggcaaagtctaaataaaaaaatcccagaatcaatgaataaataaacaagcttgttgttgatttaaaatcaagtgtttttatttcatttttcgcgcacggtatgccctagaccaccgatctctatcattgagaactcggtggattttttccaggatcctatagaggtgggattgaatgtttagatacatgggcattaggccgtctttggggtggagatagctccattgaagggattcatgctccggggtagtgttgtaaatcacccagtcataacaaggtcgcagtgcatggtgttgcacaatatcttttagaagtaggctgattgccacagataagcccttggtgtaggtgtttacaaaccggttgagctgggatgggtgcattcggggtgaaattatgtgcattttggattggatttttaagttggcaatattgccgccaagatcccgtcttgggttcatgttatgaaggaccaccaagacggtgtatccggtacatttaggaaatttatcgtgcagcttggatggaaaagcgtggaaaaatttggagacacccttgtgtcctccaagattttccatgcactcatccatgataatagcaatggggccgtgggcagcggcgcgggcaaacacgttccgtgggtctgacacatcatagttatgttcctgagttaaatcatcataagccattttaatgaatttggggcggagagtaccagattggggtatgaatgttccttcgggccccggagcatagttcccctcacagatttgcatttcccaagctttcagttccgagggtggaatcatgtccacctggggggctatgaaaaacaccgtttctggggcgggggtgattaattgtgatgatagcaaatttctgagcaattgagatttgccacatccggtggggccataaatgattccgattacgggttgcaggtggtagtttagggaacggcaactgccgtcttctcgaagcaagggggccacctcgttcatcatttcccttacatgcatattttcccgcaccaaatccattaggaggcgctctcctcctagtgatagaagttcttgtagtgaggaaaagtttttcagcggtttcagaccgtcagccatgggcattttggagagagtttgctgcaaaagttctagtctgttccacagttcagtgatgtgttctatggcatctcgatccagcagacctcctcgtttcgcgggtttggacggctcctggaatagggtatgagacgatgggcgtccagcgctgccagggttcggtccttccagggtctcagtgttcgagtcagggttgtttccgtcacagtgaaggggtgtgcgcctgcttgggcgcttgccagggtgcgcttcagactcatcctgctggtcgaaaacttctgtcgcttggcgccctgtatgtcggccaagtagcagtttaccatgagttcgtagttgagcgcctcggctgcgtggcctttggcgcggagcttacctttggaagttttcttgcataccgggcagtataggcatttcagcgcatacaacttgggcgcaaggaaaacggattctggggagtatgcatctgcgccgcaggaggcgcaaacagtttcacattccaccagccaggttaaatccggttcattggggtcaaaaacaagttttccgccatattttttgatgcgtttcttacctttggtctccatgagttcgtgtcctcgttgagtgacaaacaggctgtccgtgtccccgtagactgattttacaggcctcttctccagtggagtgcctcggtcttcttcgtacaggaactctgaccactctgatacaaaggcgcgcgtccaggccagcacaaaggaggctatgtgggaggggtagcgatcgttgtcaaccagggggtccaccttttccaaagtatgcaaacacatgtcaccctcttcaacatccaggaatgtgattggcttgtaggtgtatttcacgtgacctggggtccccgctgggggggtataaaagggggcggttctttgctcttcctcactgtcttccggatcgctgtccaggaacgtcagctgttggggtaggtattccctctcgaaggcgggcatgacctctgcactcaggttgtcagtttctaagaacgaggaggatttgatattgacagtgccggttgagatgcctttcatgaggttttcgtccatctggtcagaaaacacaatttttttattgtcaagtttggtggcaaatgatccatacagggcgttggataaaagtttggcaatggatcgcatggtttggttcttttccttgtccgcgcgctctttggcggcgatgttgagttggacatactcgcgtgccaggcacttccattcggggaagatagttgttaattcatctggcacgattctcacttgccaccctcgattatgcaaggtaattaaatccacactggtggccacctcgcctcgaaggggttcattggtccaacagagcctacctcctttcctagaacagaaagggggaagtgggtctagcataagttcatcgggagggtctgcatccatggtaaagattcccggaagtaaatccttatcaaaatagctgatgggagtggggtcatctaaggccatttgccattctcgagctgccagtgcgcgctcatatgggttaaggggactgccccatggcatgggatgggtgagtgcagaggcatacatgccacagatgtcatagacgtagatgggatcctcaaagatgcctatgtaggttggatagcatcgcccccctctgatacttgctcgcacatagtcatatagttcatgtgatggcgctagcagccccggacccaagttggtgcgattgggtttttctgttctgtagacgatctggcgaaagatggcgtgagaattggaagagatggtgggtctttgaaaaatgttgaaatgggcatgaggtagacctacagagtctctgacaaagtgggcataagattcttgaagcttggttaccagttcggcggtgacaagtacgtctagggcgcagtagtcaagtgtttcttgaatgatgtcataacctggttggtttttcttttcccacagttcgcggttgagaaggtattcttcgcgatccttccagtactcttctagcggaaacccgtctttgtctgcacggtaagatcctagcatgtagaactgattaactgccttgtaagggcagcagcccttctctacgggtagagagtatgcttgagcagcttttcgtagcgaagcgtgagtaagggcaaaggtgtctctgaccatgactttgaggaattggtatttgaagtcgatgtcgtcacaggctccctgttcccagagttggaagtctacccgtttcttgtaggcggggttgggcaaagcgaaagtaacatcattgaagagaatcttgccggccctgggcatgaaattgcgagtgatgcgaaaaggctgtggtacttccgctcggttattgataacctgggcagctaggacgatctcgtcgaaaccgttgatgttgtgtcctacgatgtataattctatgaaacgcggcgtgcctctgacgtgaggtagcttactgagctcatcaaaggttaggtctgtggggtcagataaggcgtagtgttcgagagcccattcgtgcaggtgaggattcgctttaaggaaggaggaccagaggtccactgccagtgctgtttgtaactggtcccggtactgacgaaaatgccgtccgactgccattttttctggggtgacgcaatagaaggtttgggggtcctgccgccagcgatcccacttgagttttatggcgaggtcataggcgatgttgacgagccgctggtctccagagagtttcatgaccagcatgaaggggattagctgcttgccaaaggaccccatccaggtgtaggtttccacatcgtaggtgagaaagagcctttctgtgcgaggatgagagccaatcgggaagaactggatctcctgccaccagttggaggaatggctgttgatgtgatggaagtagaactccctgcgacgcgccgagcattcatgcttgtgcttgtacagacggccgcagtagtcgcagcgttgcacgggttgtatctcgtgaatgagttgtacctggcttcccttgacgagaaatttcagtgggaagccgaggcctggcgattgtatctcgtgctttactatgttgtctgcatcggcctgttcatcttctgtctcgatggtggtcatgctgacgagccctcgcgggaggcaagtccagacctcggcgcggcaggggcggagctcgaggacgagagcgcgcaggctggagctgtccagggtcctgagacgctgcggactcaggttagtaggcagtgtcaggagattaacttgcatgatcttttggagggcgtgcgggaggttcagatagtacttgatctcaacgggtccgttggtggagatgtcgatggcttgcagggttccgtgtcccttgggcgctaccaccgtgcccttgtttttcattttggacggcggtggctctgttgcttcttgcatgtttagaagcggtgtcgagggcgcgcaccgggcggcaggggcggctcgggacccggcggcatggctggcagtggtacgtcggcgccgcgcgcgggtaggttctggtactgcgccctgagaagactcgcatgcgcgacgacgcggcggttgacatcctggatctgacgcctctgggtgaaagctaccggccccgtgagcttgaacctgaaagagagttcaacagaatcaatctcggtatcgttgacggcggcttgcctaaggatttcttgcacgtcaccagagttgtcctggtaggcgatctccgccatgaactgctcgatctcttcctcttgaagatctccgcggcccgctctctcgacggtggccgcgaggtcgttggagatgcgcccaatgagttgagagaatgcattcatgcccgcctcgttccagacgcggctgtagaccacggcccccacgggatctctcgcgcgcatgaccacctgggcgaggttgagctccacgtggcgggtgaagaccgcatagttgcataggcgctggaaaaggtagttgagtgtggtggcgatgtgctcggtgacgaagaaatacatgatccatcgtctcagcggcatctcgctgacatcgcccagagcttccaagcgctccatggcctcgtagaagtccacggcaaaattaaaaaactgggagtttcgcgcggacacggtcaactcctcttccagaagacggataagttcggcgatggtggtgcgcacctcgcgctcgaaagcccctgggatttcttcctcaatctcttcttcttccactaacatctcttcctcttcaggtggggctgcaggaggagggggaacgcggcgacgccggcggcgcacgggcagacggtcgatgaatctttcaatgacctctccgcggcggcggcgcatggtttcagtgacggcgcggccgttctcgcgcggtcgcagagtaaaaacaccgccgcgcatctccttaaagtggtgactgggaggttctccgtttgggagggagagggcgctgattatacattttattaattggcccgtagggactgcacgcagagatctgatcgtgtcaagatccacgggatctgaaaacctttcgacgaaagcgtctaaccagtcacagtcacaaggtaggctgagtacggcttcttgtgggcgggggtggttatgtgttcggtctgggtcttctgtttcttcttcatctcgggaaggtgagacgatgctgctggtgatgaaattaaagtaggcagttctaagacggcggatggtggcgaggagcaccaggtctttgggtccggcttgctggatacgcaggcgattggccattccccaagcattatcctgacatctagcaagatctttgtagtagtcttgcatgagccgttctacgggcacttcttcctcacccgttctgccatgcatacgtgtgagtccaaatccgcgcattggttgtaccagtgccaagtcagctacgactctttcggcgaggatggcttgctgtacttgggtaagggtggcttgaaagtcatcaaaatccacaaagcggtggtaagctcctgtattaatggtgtaagcacagttggccatgactgaccagttaactgtctggtgaccagggcgcacgagctcggtgtatttaaggcgcgaataggcgcgggtgtcaaagatgtaatcgttgcaggtgcgcaccagatactggtaccctataagaaaatgcggcggtggttggcggtagagaggccatcgttctgtagctggagcgccaggggcgaggtcttccaacataaggcggtgatagccgtagatgtacctggacatccaggtgattcctgcggcggtagtagaagcccgaggaaactcgcgtacgcggttccaaatgttgcgtagcggcatgaagtagttcattgtaggcacggtttgaccagtgaggcgcgcgcagtcattgatgctctatagacacggagaaaatgaaagcgttcagcgactcgactccgtagcctggaggaacgtgaacgggttgggtcgcggtgtaccccggttcgagacttgtactcgagccggccggagccgcggctaacgtggtattggcactcccgtctcgacccagcctacaaaaatccaggatacggaatcgagtcgttttgctggtttccgaatggcagggaagtgagtcctattttttttttttgccgctcagatgcatcccgtgctgcgacagatgcgcccccaacaacagcccccctcgcagcagcagcagcagcaatcacaaaaggctgtccctgcaactactgcaactgccgccgtgagcggtgcgggacagcccgcctatgatctggacttggaagagggcgaaggactggcacgtctaggtgcgccttcacccgagcggcatccgcgagttcaactgaaaaaagattctcgcgaggcgtatgtgccccaacagaacctatttagagacagaagcggcgaggagccggaggagatgcgagcttcccgctttaacgcgggtcgtgagctgcgtcacggtttggaccgaagacgagtgttgcgggacgaggatttcgaagttgatgaaatgacagggatcagtcctgccagggcacacgtggctgcagccaaccttgtatcggcttacgagcagacagtaaaggaagagcgtaacttccaaaagtcttttaataatcatgtgcgaaccctgattgcccgcgaagaagttacccttggtttgatgcatttgtgggatttgatggaagctatcattcagaaccctactagcaaacctctgaccgcccagctgtttctggtggtgcaacacagcagagacaatgaggctttcagagaggcgctgctgaacatcaccgaacccgaggggagatggttgtatgatcttatcaacattctacagagtatcatagtgcaggagcggagcctgggcctggccgagaaggtggctgccatcaattactcggttttgagcttgggaaaatattacgctcgcaaaatctacaagactccatacgttcccatagacaaggaggtgaagatagatgggttctacatgcgcatgacgctcaaggtcttgaccctgagcgatgatcttggggtgtatcgcaatgacagaatgcatcgcgcggttagcgccagcaggaggcgcgagttaagcgacagggaactgatgcacagtttgcaaagagctctgactggagctggaaccgagggtgagaattacttcgacatgggagctgacttgcagtggcagcctagtcgcagggctctgagcgccgcgacggcaggatgtgagcttccttacatagaagaggcggatgaaggcgaggaggaagagggcgagtacttggaagactgatggcacaacccgtgttttttgctagatggaacagcaagcaccggatcccgcaatgcgggcggcgctgcagagccagccgtccggcattaactcctcggacgattggacccaggccatgcaacgtatcatggcgttgacgactcgcaaccccgaagcctttagacagcaaccccaggccaaccgtctatcggccatcatggaagctgtagtgccttcccgctctaatcccactcatgagaaggtcctggccatcgtgaacgcgttggtggagaacaaagctattcgtccagatgaggccggactggtatacaacgctctcttagaacgcgtggctcgctacaacagtagcaatgtgcaaaccaatttggaccgtatgataacagatgtacgcgaagccgtgtctcagcgcgaaaggttccagcgtgatgccaacctgggttcgctggtggcgttaaatgctttcttgagtactcagcctgctaatgtgccgcgtggtcaacaggattatactaactttttaagtgctttgagactgatggtatcagaagtacctcagagcgaagtgtatcagtccggtcctgattacttctttcagactagcagacagggcttgcagacggtaaatctgagccaagcttttaaaaaccttaaaggtttgtggggagtgcatgccccggtaggagaaagagcaaccgtgtctagcttgttaactccgaactcccgcctattattactgttggtagctcctttcaccgacagcggtagcatcgaccgtaattcctatttgggttacctactaaacctgtatcgcgaagccatagggcaaagtcaggtggacgagcagacctatcaagaaattacccaagtcagtcgcgctttgggacaggaagacactggcagtttggaagccactctgaacttcttgcttaccaatcggtctcaaaagatccctcctcaatatgctcttactgcggaggaggagaggatccttagatatgtgcagcagagcgtgggattgtttctgatgcaagagggggcaactccgactgcagcactggacatgacagcgcgaaatatggagcccagcatgtatgccagtaaccgacctttcattaacaaactgctggactacttgcacagagctgccgctatgaactctgattatttcaccaatgccatcttaaacccgcactggctgcccccacctggtttctacacgggcgaatatgacatgcccgaccctaatgacggatttctgtgggacgacgtggacagcgatgttttttcacctctttctgatcatcgcacgtggaaaaaggaaggcggcgatagaatgcattcttctgcatcgctgtccggggtcatgggtgctaccgcggctgagcccgagtctgcaagtccttttcctagtctacccttttctctacacagtgtacgtagcagcgaagtgggtagaataagtcgcccgagtttaatgggcgaagaggagtatctaaacgattccttgctcagaccggcaagagaaaaaaatttcccaaacaatggaatagaaagtttggtggataaaatgagtagatggaagacttatgctcaggatcacagagacgagcctgggatcatggggattacaagtagagcgagccgtagacgccagcgccatgacagacagaggggtcttgtgtgggacgatgaggattcggccgatgatagcagcgtgctggacttgggtgggagaggaaggggcaacccgtttgctcatttgcgccctcgcttgggtggtatgttgtaaaaaaaaataaaaaaaaaactcaccaaggccatggcgacgagcgtacgttcgttcttctttattatctgtgtctagtataatgaggcgagtcgtgctaggcggagcggtggtgtatccggagggtcctcctccttcgtacgagagcgtgatgcagcagcagcaggcgacggcggtgatgcaatccccactggaggctccctttgtgcctccgcgatacctggcacctacggagggcagaaacagcattcgttattcggaactggcacctcagtacgataccaccaggttgtatctggtggacaacaagtcggcggacattgcttctctgaactatcagaatgaccacagcaacttcttgaccacggtggtgcaaaacaatgactttacccctacggaagccagcacccagaccattaactttgatgaacgatcgcggtggggcggtcagctaaagaccatcatgcatactaacatgccaaacgtgaacgagtatatgtttagtaacaagttcaaagcgcgtgtgatggtgtccagaaaacctcccgacggtgctgcagttggggatacttatgatcacaagcaggatattttgaaatatgagtggttcgagtttactttgccagaaggcaacttttcagttactatgactattgatttgatgaacaatgccatcatagataattacttgaaagtgggtagacagaatggagtgcttgaaagtgacattggtgttaagttcgacaccaggaacttcaagctgggatgggatcccgaaaccaagttgatcatgcctggagtgtatacgtatgaagccttccatcctgacattgtcttactgcctggctgcggagtggattttaccgagagtcgtttgagcaaccttcttggtatcagaaaaaaacagccatttcaagagggttttaagattttgtatgaagatttagaaggtggtaatattccggccctcttggatgtagatgcctatgagaacagtaagaaagaacaaaaagccaaaatagaagctgctacagctgctgcagaagctaaggcaaacatagttgccagcgactctacaagggttgctaacgctggagaggtcagaggagacaattttgcgccaacacctgttccgactgcagaatcattattggccgatgtgtctgaaggaacggacgtgaaactcactattcaacctgtagaaaaagatagtaagaatagaagctataatgtgttggaagacaaaatcaacacagcctatcgcagttggtatctttcgtacaattatggcgatcccgaaaaaggagtgcgttcctggacattgctcaccacctcagatgtcacctgcggagcagagcaggtctactggtcgcttccagacatgatgaaggatcctgtcactttccgctccactagacaagtcagtaactaccctgtggtgggtgcagagcttatgcccgtcttctcaaagagcttctacaacgaacaagctgtgtactcccagcagctccgccagtccacctcgcttacgcacgtcttcaaccgctttcctgagaaccagattttaatccgtccgccggcgcccaccattaccaccgtcagtgaaaacgttcctgctctcacagatcacgggaccctgccgttgcgcagcagtatccggggagtccaacgtgtgaccgttactgacgccagacgccgcacctgtccctacgtgtacaaggcactgggcatagtcgcaccgcgcgtcctttcaagccgcactttctaaaaaaaaaaaaaatgtccattcttatctcgcccagtaataacaccggttggggtctgcgcgctccaagcaagatgtacggaggcgcacgcaaacgttctacccaacatcctgtccgtgttcgcggacattttcgcgctccatggggcgccctcaagggccgcactcgcgttcgaaccaccgtcgatgatgtaatcgatcaggtggttgccgacgcccgtaattatactcctactgcgcctacatctactgtggatgcagttattgacagtgtagtggctgacgctcgcaactatgctcgacgtaagagccggcgaaggcgcattgccagacgccaccgagctaccactgccatgcgagccgcaagagctctgctacgaagagctagacgcgtggggcgaagagccatgcttagggcggccagacgtgcagcttcgggcgccagcgccggcaggtcccgcaggcaagcagccgctgtcgcagcggcgactattgccgacatggcccaatcgcgaagaggcaatgtatactgggtgcgtgacgctgccaccggtcaacgtgtacccgtgcgcacccgtccccctcgcacttagaagatactgagcagtctccgatgttgtgtcccagcggcgaggatgtccaagcgcaaatacaaggaagaaatgctgcaggttatcgcacctgaagtctacggccaaccgttgaaggatgaaaaaaaaccccgcaaaatcaagcgggttaaaaaggacaaaaaagaagaggaagatggcgatgatgggctggcggagtttgtgcgcgagtttgccccacggcgacgcgtgcaatggcgtgggcgcaaagttcgacatgtgttgagacctggaacttcggtggtctttacacccggcgagcgttcaagcgctacttttaagcgttcctatgatgaggtgtacggggatgatgatattcttgagcaggcggctgaccgattaggcgagtttgcttatggcaagcgtagtagaataacttccaaggatgagacagtgtcgatacccttggatcatggaaatcccacccctagtcttaaaccggtcactttgcagcaagtgttacccgtaactccgcgaacaggtgttaaacgcgaaggtgaagatttgtatcccactatgcaactgatggtacccaaacgccagaagttggaggacgttttggagaaagtaaaagtggatccagatattcaacctgaggttaaagtgagacccattaagcaggtagcgcctggtctgggggtacaaactgtagacattaagattcccactgaaagtatggaagtgcaaactgaacccgcaaagcctactgccacctccactgaagtgcaaacggatccatggatgcccatgcctattacaactgacgccgccggtcccactcgaagatcccgacgaaagtacggtccagcaagtctgttgatgcccaattatgttgtacacccatctattattcctactcctggttaccgaggcactcgctactatcgcagccgaaacagtacctcccgccgtcgccgcaagacacctgcaaatcgcagtcgtcgccgtagacgcacaagcaaaccgactcccggcgccctggtgcggcaagtgtaccgcaatggtagtgcggaacctttgacactgccgcgtgcgcgttaccatccgagtatcatcacttaatcaatgttgccgctgcctccttgcagatatggccctcacttgtcgccttcgcgttcccatcactggttaccgaggaagaaactcgcgccgtagaagagggatgttgggacgcggaatgcgacgctacaggcgacggcgtgctatccgcaagcaattgcggggtggttttttaccagccttaattccaattatcgctgctgcaattggcgcgataccaggcatagcttccgtggcggttcaggcctcgcaacgacattgacattggaaaaaaacgtataaataaaaaaaaaaaaatacaatggactctgacactcctggtcctgtgactatgttttcttagagatggaagacatcaatttttcatccttggctccgcgacacggcacgaagccgtacatgggcacctggagcgacatcggcacgagccaactgaacgggggcgccttcaattggagcagtatctggagcgggcttaaaaattttggctcaaccataaaaacatacgggaacaaagcttggaacagcagtacaggacaggcgcttagaaataaacttaaagaccagaacttccaacaaaaagtagtcgatgggatagcttccggcatcaatggagtggtagatttggctaaccaggctgtgcagaaaaagataaacagtcgtttggacccgccgccagcaaccccaggtgaaatgcaagtggaggaagaaattcctccgccagaaaaacgaggcgacaagcgtccgcgtcccgatttggaagagacgctggtgacgcgcgtagatgaaccgccttcttatgaggaagcaacgaagcttggaatgcccaccactagaccgatagccccaatggccaccggggtgatgaaaccttctcagttgcatcgacccgtcaccttggatttgccccctccccctgctgctactgctgtacccgcttctaagcctgtcgctgccccgaaaccagtcgccgtagccaggtcacgtcccgggggcgctcctcgtccaaatgcgcactggcaaaatactctgaacagcatcgtgggtctaggcgtgcaaagtgtaaaacgccgtcgctgcttttaattaaatatggagtagcgcttaacttgcctatctgtgtatatgtgtcattacacgccgtcacagcagcagaggaaaaaaggaagaggtcgtgcgtcgacgctgagttactttcaagatggccaccccatcgatgctgccccaatgggcatacatgcacatcgccggacaggatgcttcggagtacctgagtccgggtctggtgcagttcgcccgcgccacagacacctacttcaatctgggaaataagtttagaaatcccaccgtagcgccgacccacgatgtgaccaccgaccgtagccagcggctcatgttgcgcttcgtgcccgttgaccgggaggacaatacatactcttacaaagtgcggtacaccctggccgtgggcgacaacagagtgctggatatggccagcacgttctttgacattaggggtgtgttggacagaggtcccagtttcaaaccctattctggtacggcttacaactccctggctcctaaaggcgctccaaatacatctcagtggattgcagaaggtgtaaaaaatacaactggtgaggaacacgtaacagaagaggaaaccaatactactacttacacttttggcaatgctcctgtaaaagctgaagctgaaattacaaaagaaggactcccagtaggtttggaagtttcagatgaagaaagtaaaccgatttatgctgataaaacatatcagccagaacctcagctgggagatgaaacttggactgaccttgatggaaaaaccgaaaagtatggaggcagggctctcaaacccgatactaagatgaaaccatgctacgggtcctttgccaaacctactaatgtgaaaggcggtcaggcaaaacaaaaaacaacggagcagccaaatcagaaagtcgaatatgatatcgacatggagttttttgatgcggcatcgcagaaaacaaacttaagtcctaaaattgtcatgtatgcagaaaatgtaaatttggaaactccagacactcatgtagtgtacaaacctggaacagaagacacaagttccgaagctaatttgggacaacaatctatgcccaacagacccaactacattggcttcagagataactttattggacttatgtactataacagtactggtaacatgggggtgctggctggtcaagcgtctcagttaaatgcagtggttgacttgcaggacagaaacacagaactttcttaccaactcttgcttgactctctgggcgacagaaccagatactttagcatgtggaatcaggctgtggacagttatgatcctgatgtacgtgttattgaaaatcatggtgtggaagatgaacttcccaactactgttttccactggacggcataggtgttccaacaaccagttacaaatcaatagttccaaatggagacaatgcgcctaattggaaggaacctgaagtaaatggaacaagtgagatcggacagggtaatttgtttgccatggaaattaaccttcaagccaatctatggcgaagtttcctttattccaatgtggctctatatctcccagactcgtacaaatacaccccgtccaatgtcactcttccagaaaacaaaaacacctacgactacatgaacgggcgggtggtgccgccatctctagtagacacctatgtgaacattggtgccaggtggtctctggatgccatggacaatgtcaacccattcaaccaccaccgtaacgctggcttgcgttaccgatccatgcttctgggtaacggacgttatgtgcctttccacatacaagtgcctcaaaaattcttcgctgttaaaaacctgctgcttctcccaggctcctacacttatgagtggaactttaggaaggatgtgaacatggttctacagagttccctcggtaacgacctgcgggtagatggcgccagcatcagtttcacgagcatcaacctctatgctacttttttccccatggctcacaacaccgcttccacccttgaagccatgctgcggaatgacaccaatgatcagtcattcaacgactacctatctgcagctaacatgctctaccccattcctgccaatgcaaccaatattcccatttccattccttctcgcaactgggcggctttcagaggctggtcatttaccagactgaaaaccaaagaaactccctctttggggtctggatttgacccctactttgtctattctggttctattccctacctggatggtaccttctacctgaaccacacttttaagaaggtttccatcatgtttgactcttcagtgagctggcctggaaatgacaggttactatctcctaacgaatttgaaataaagcgcactgtggatggcgaaggctacaacgtagcccaatgcaacatgaccaaagactggttcttggtacagatgctcgccaactacaacatcggctatcagggcttctacattccagaaggatacaaagatcgcatgtattcatttttcagaaacttccagcccatgagcaggcaggtggttgatgaggtcaattacaaagacttcaaggccgtcgccataccctaccaacacaacaactctggctttgtgggttacatggctccgaccatgcgccaaggtcaaccctatcccgctaactatccctatccactcattggaacaactgccgtaaatagtgttacgcagaaaaagttcttgtgtgacagaaccatgtggcgcataccgttctcgagcaacttcatgtctatgggggcccttacagacttgggacagaatatgctctatgccaactcagctcatgctctggacatgacctttgaggtggatcccatggatgagcccaccctgctttatcttctcttcgaagttttcgacgtggtcagagtgcatcagccacaccgcggcatcatcgaggcagtctacctgcgtacaccgttctcggccggtaacgctaccacgtaagaagcttcttgcttcttgcaaatagcagctgcaaccatggcctgcggatcccaaaacggctccagcgagcaagagctcagagccattgtccaagacctgggttgcggaccctattttttgggaacctacgataagcgcttcccggggttcatggcccccgataagctcgcctgtgccattgtaaatacggccggacgtgagacggggggagagcactggttggctttcggttggaacccacgttctaacacctgctacctttttgatccttttggattctcggatgatcgtctcaaacagatttaccagtttgaatatgagggtctcctgcgccgcagcgctcttgctaccaaggaccgctgtattacgctggaaaaatctacccagaccgtgcagggtccccgttctgccgcctgcggacttttctgctgcatgttccttcacgcctttgtgcactggcctgaccgtcccatggacggaaaccccaccatgaaattgctaactggagtgccaaacaacatgcttcattctcctaaagtccagcccaccctgtgtgacaatcaaaaagcactctaccattttcttaatacccattcgccttattttcgctcccatcgtacacacatcgaaagggccactgcgttcgaccgtatggatgttcaataatgactcatgtaaacaacgtgttcaataaacatcactttatttttttacatgtatcaaggctctgcattacttatttatttacaagtcgaatgggttctgacgagaatcagaatgacccgcaggcagtgatacgttgcggaactgatacttgggttgccacttgaattcgggaatcaccaacttgggaaccggtatatcgggcaggatgtcactccacagctttctggtcagctgcaaagctccaagcaggtcaggagccgaaatcttgaaatcacaattaggaccagtgctttgagcgcgagagttgcggtacaccggattgcagcactgaaacaccatcagcgacggatgtctcacgcttgccagcacggtgggatctgcaatcatgcccacatccagatcttcagcattggcaatgctgaacggggtcatcttgcaggtctgcctacccatggcgggcacccaattaggcttgtggttgcaatcgcagtgcagggggatcagtatcatcttggcctgatcctgtctgattcctggatacacggctctcatgaaagcatcatattgcttgaaagcctgctgggctttactaccctcggtataaaacatcccgcaggacctgctcgaaaactggttagctgcacagccggcatcattcacacagcagcgggcgtcattgttagctatttgcaccacacttctgccccagcggttttgggtgattttggttcgctcgggattctcctttaaggctcgttgtccgttctcgctggccacatccatctcgataatctgctccttctgaatcataatattgccatgcaggcacttcagcttgccctcataatcattgcagccatgaggccacaacgcacagcctgtacattcccaattatggtgggcgatctgagaaaaagaatgtatcattccctgcagaaatcttcccatcatcgtgctcagtgtcttgtgactagtgaaagttaactggatgcctcggtgctcctcgtttacgtactggtgacagatgcgcttgtattgttcgtgttgctcaggcattagtttaaaagaggttctaagttcgttatccagcctgtacttctccatcagcagacacatcacttccatgcctttctcccaagcagacaccaggggcaagctaatcggattcttaacagtgcaggcagcagctcctttagccagagggtcatctttagcgatcttctcaatgcttcttttgccatccttctcaacgatgcgcacgggcgggtagctgaaacccactgctacaagttgcgcctcttctctttcttcttcgctgtcttgactgatgtcttgcatggggatatgtttggtcttccttggcttctttttggggggtatcggaggaggaggactgtcgctccgttccggagacagggaggattgtgacgtttcgctcaccattaccaactgactgtcggtagaagaacctgaccccacacggcgacaggtgtttctcttcgggggcagaggtggaggcgattgcgaagggctgcggtccgacctggaaggcggatgactggcagaaccccttccgcgttcgggggtgtgctccctgtggcggtcgcttaactgatttccttcgcggctggccattgtgttctcctaggcagagaaacaacagacatggaaactcagccattgctgtcaacatcgccacgagtgccatcacatctcgtcctcagcgacgaggaaaaggagcagagcttaagcattccaccgcccagtcctgccaccacctctaccctagaagataaggaggtcgacgcatctcatgacatgcagaataaaaaagcgaaagagtctgagacagacatcgagcaagacccgggctatgtgacaccggtggaacacgaggaagagttgaaacgctttctagagagagaggatgaaaactgcccaaaacaacgagcagataactatcaccaagatgctggaaatagggatcagaacaccgactacctcatagggcttgacggggaagacgcgctccttaaacatctagcaagacagtcgctcatagtcaaggatgcattattggacagaactgaagtgcccatcagtgtggaagagctcagccgcgcctacgagcttaacctcttttcacctcgtactccccccaaacgtcagccaaacggcacctgcgagccaaatcctcgcttaaacttttatccagcttttgctgtgccagaagtactggctacctatcacatcttttttaaaaatcaaaaaattccagtctcctgccgcgctaatcgcacccgcgccgatgccctactcaatctgggacctggttcacgcttacctgatatagcttccttggaagaggttccaaagatcttcgagggtctgggcaataatgagactcgggccgcaaatgctctgcaaaagggagaaaatggcatggatgagcatcacagcgttctggtggaattggaaggcgataatgccagactcgcagtactcaagcgaagcatcgaggtcacacacttcgcatatcccgctgtcaacctgccccctaaagtcatgacggcggtcatggaccagttactcattaagcgcgcaagtcccctttcagaagacatgcatgacccagatgcctgtgatgagggtaaaccagtggtcagtgatgagcagctaacccgatggctgggcaccgactctcccagggatttggaagagcgtcgcaagcttatgatggccgtggtgctggttaccgtagaactagagtgtctccgacgtttctttaccgattcagaaaccttgcgcaaactcgaagagaatctgcactacacttttagacacggctttgtgcggcaggcatgcaagatatctaacgtggaactcaccaacctggtttcctacatgggtattctgcatgagaatcgcctaggacaaagcgtgctgcacagcaccctgaagggggaagcccgccgtgattacatccgcgattgtgtctatctgtacctgtgccacacgtggcaaaccggcatgggtgtatggcagcaatgtttagaagaacagaacttgaaagagcttgacaagctcttacagaaatctcttaaggttctgtggacagggttcgacgagcgcaccgtcgcttccgacctggcagacctcatcttcccagagcgtctcagggttactttgcgaaacggattgcctgactttatgagccagagcatgcttaacaattttcgctctttcatcctggaacgctccggtatcctgcccgccacctgctgcgcactgccctccgactttgtgcctctcacctaccgcgagtgccccccgccgctatggagtcactgctacctgttccgtctggccaactatctctcctaccactcggatgtgatcgaggatgtgagcggagacggcttgctggagtgtcactgccgctgcaatctgtgcacgccccaccggtccctagcttgcaacccccagttgatgagcgaaacccagataataggcacctttgaattgcaaggccccagcagccaaggcgatgggtcttctcctgggcaaagtttaaaactgaccccgggactgtggacctccgcctacttgcgcaagtttgctccggaagattaccacccctatgaaatcaagttctatgaggaccaatcacagcctccaaaggccgaactttcggcctgcgtcatcacccagggggcaattctggcccaattgcaagccatccaaaaatcccgccaagaatttctactgaaaaagggtaagggggtctaccttgacccccagaccggcgaggaactcaacacaaggttccctcaggatgtcccaacgacgagaaaacaagaagttgaaggtgcagccgccgcccccagaagatatggaggaagattgggacagtcaggcagaggaggcggaggaggacagtctggaggacagtctggaggaagacagtttggaggaggaaaacgaggaggcagaggaggtggaagaagtaaccgccgacaaacagttatcctcggctgcggagacaagcaacagcgctaccatctccgctccgagtcgaggaacccggcggcgtcccagcagtagatgggacgagaccggacgcttcccgaacccaaccagcgcttccaagaccggtaagaaggatcggcagggatacaagtcctggcgggggcataagaatgccatcatctcctgcttgcatgagtgcgggggcaacatatccttcacgcggcgctacttgctattccaccatggggtgaactttccgcgcaatgttttgcattactaccgtcacctccacagcccctactatagccagcaaatcccggcagtctcgacagataaagacagcggcggcgacctccaacagaaaaccagcagcggcagttagaaaatacacaacaagtgcagcaacaggaggattaaagattacagccaacgagccagcgcaaacccgagagttaagaaatcggatctttccaaccctgtatgccatcttccagcagagtcggggtcaagagcaggaactgaaaataaaaaaccgatctctgcgttcgctcaccagaagttgtttgtatcacaagagcgaagatcaacttcagcgcactctcgaggacgccgaggctctcttcaacaagtactgcgcgctgactcttaaagagtaggcagcgaccgcgcttattcaaaaaaggcgggaattacatcatcctcgacatgagtaaagaaattcccacgccttacatgtggagttatcaaccccaaatgggattggcggcaggcgcctcccaggactactccacccgcatgaattggctcagcgccgggccttctatgatttctcgagttaatgatatacgcgcctaccgaaaccaaatacttttggaacagtcagctcttaccaccacgccccgccaacaccttaatcccagaaattggcccgccgccctagtgtaccaggaaagtcccgctcccaccactgtattacttcctcgagacgcccaggccgaagtccaaatgactaatgcaggtgcgcagttagctggcggctccaccctatgtcgtcacaggcctcggcataatataaaacgcctgatgatcagaggccgaggtatccagctcaacgacgagtcggtgagctctccgcttggtctacgaccagacggaatctttcagattgccggctgcgggagatcttccttcacccctcgtcaggctgttctgactttggaaagttcgtcttcgcaaccccgctcgggcggaatcgggaccgttcaatttgtggaggagtttactccctctgtctacttcaaccccttctccggatctcctgggcattacccggacgagttcataccgaacttcgacgcgattagcgagtcagtggacggctacgattgatgtctggtgacgcggctgagctatctcggctgcgacatctagaccactgccgccgctttcgctgctttgcccgggaactcattgagttcatctacttcgaactccccaaggatcaccctcaaggtccggcccacggagtgcggatttctatcgaaggcaaaatagactctcgcctgcaacgaattttctcccagcggcccgtgctgatcgagcgagaccagggaaacaccacggtttccatctactgcatttgtaatcaccccggattgcatgaaagcctttgctgtcttatgtgtactgagtttaataaaaactgaattaagactctcctacggactgccgcttcttcaacccggattttacaaccagaagaacgaaacttttcctgtcgtccaggactctgttaacttcacctttcctactcacaaactagaagctcaacgactacaccgcttttccagaagcattttccctactaatactactttcaaaaccggaggtgagctccaaggtcttcctacagaaaacccttgggtggaagcgggccttgtagtgctaggaattcttgcgggtgggcttgtgattattctttgctacctatacacaccttgcttcactttcttagtggtgttgtggtattggtttaaaaaatggggcccatactagtcttgcttgttttactttcgcttttggaaccgggttctgccaattacgatccatgtctagacttcgacccagaaaactgcacacttacttttgcacccgacacaagccgcatctgtggagttcatcgcctctcttacgaacttggcccccaacgacaaaaatttacctgcatggtgggaatcaaccccatagttatcacccagcaaagtggagatactaagggttgcattcactgctcctgcgattccatcgagtgcacctacaccctgctgaagaccctatgcggcctaagagacctgctaccaatgaattaaaaaatgattaataaaaaatcacttacttgaaatcagcaataaggtctctgttgaaattttctcccagcagcacctcacttccctcttcccaactctggtattctaaaccccgttcagcggcatactttctccatactttaaaggggatgtcaaattttagctcctctcctgtacccacaatcttcatgtctttcttcccagatgaccaagagagtccggctcagtgactccttcaaccctgtctacccctatgaagatgaaagcacctcccaacacccctttataaacccagggtttatttccccaaatggcttcacacaaagcccaaacggagttcttactttaaaatgtttaaccccactaacaaccacaggcggatctctacagctaaaagtgggagggggacttacagtggatgacaccaacggttttttgaaagaaaacataagtgccaccacaccactcgttaagactggtcactctataggtttaccactaggagccggattgggaacgaatgaaaataaactttgtatcaaattaggacaaggacttacattcaattcaaacaacatttgcattgatgacaatattaacaccttatggacaggagtcaaccccaccgaagccaactgtcaaatcatgaactccagtgaatctaatgattgcaaattaattctaacactagttaaaactggagcactagtcactgcatttgtttatgttataggagtatctaacaattttaatatgctaactacacacagaaatataaattttactgcagagctgtttttcgattctactggtaatttactaactagactctcatccctcaaaactccacttaatcataaatcaggacaaaacatggctactggtgccattactaatgctaaaggtttcatgcccagcacgactgcctatcctttcaatgataattctagagaaaaagaaaactacatttacggaacttgttactacacagctagtgatcgcactgcttttcccattgacatatctgtcatgcttaaccgaagagcaataaatgacgagacatcatattgtattcgtataacttggtcctggaacacaggagatgccccagaggtgcaaacctctgctacaaccctagtcacctccccatttaccttttactacatcagagaagacgactgacaaataaagtttgcgatcgccaggcccaccatggctcagtcactggctctgagcctccttatcctggttctggcctttggcatccccaggacccaaggcagtgatggaggggctcaggactgttgcctcaagtacagccaaaggaagattcccgccaaggttgtccgcagctaccggaagcaggaaccaagcttaggctgctccatcccagctatcctgttcttgccccgcaagcgctctcaggcagagctatgtgcagacccaaaggagctctgggtgcagcagctgatgcagcatctggacaagacaccatccccacagaaaccagcccagggctgcaggaaggacaggggggcctccaagactggcaagaaaggaaagggctccaaaggctgcaagaggactgagcggtcacagacccctaaagggccaggaagcggacagtgtactaattatgctctcttgaaattggctggagatgttgagagcaaccctggacctgactggacctggcgcatcctgttcttggtggcagctgctacgggagctcattccaactgggtgaatgtaataagtgatttgaaaaaaattgaagatcttattcaatctatgcatattgatgctactttatatacggaaagtgatgttcaccccagttgcaaagtaacagcaatgaagtgctttctcttggagttacaagttatttcacttgagtccggagatgcaagtattcatgatacagtagaaaatctgatcatcctagcaaacaacagtttgtcttctaatgggaatgtaacagaatctggatgcaaagaatgtgaggaactggaggaaaaaaatattaaagaatttttgcagagttttgtacatattgtccaaatgttcatcaacacttctggaagcggagtgaaacagactttgaattttgaccttctcaagttggcgggagacgtggagtccaaccctggaccttgtcaccagcagttggtcatctcttggttttccctggtttttctggcatctcccctcgtggccatatgggaactgaagaaagatgtttatgtcgtagaattggattggtatccggatgcccctggagaaatggtggtcctcacctgtgacacccctgaagaagatggtatcacctggaccttggaccagagcagtgaggtcttaggctctggcaaaaccctgaccatccaagtcaaagagtttggagatgctggccagtacacctgtcacaaaggaggcgaggttctaagccattcgctcctgctgcttcacaaaaaggaagatggaatttggtccactgatattttaaaggaccagaaagaacccaaaaataagacctttctaagatgcgaggccaagaattattctggacgtttcacctgctggtggctgacgacaatcagtactgatttgacattcagtgtcaaaagcagcagaggctcttctgacccccaaggggtgacgtgcggagctgctacactctctgcagagagagtcagaggggacaacaaggagtatgagtactcagtggagtgccaggaggacagtgcctgcccagctgctgaggagagtctgcccattgaggtcatggtggatgccgttcacaagctcaagtatgaaaactacaccagcagcttcttcatcagggacatcatcaaacctgacccacccaagaacttgcagctgaagccattaaagaattctcggcaggtggaggtcagctgggagtaccctgacacctggagtactccacattcctacttctccctgacattctgcgttcaggtccagggcaagagcaagagagaaaagaaagatagagtcttcacggacaagacctcagccacggtcatctgccgcaaaaatgccagcattagcgtgcgggcccaggaccgctactatagctcatcttggagcgaatgggcatctgtgccctgcagtggagggggcggcagcgggggaggcggcagcggcggcgggggatcgagaaacctccccgtggccactccagacccaggaatgttcccatgccttcaccactcccaaaacctgctgagggccgtcagcaacatgctccagaaggccagacaaactctagaattttacccttgcacttctgaagagattgatcatgaagatatcacaaaagataaaaccagcacagtggaggcctgtttaccattggaattaaccaagaatgagagttgcctaaattccagagagacctctttcataactaatgggagttgcctggcctccagaaagacctcttttatgatggccctgtgccttagtagtatttatgaagacttgaagatgtaccaggtggagttcaagaccatgaatgcaaagcttctgatggatcctaagaggcagatctttctagatcaaaacatgctggcagttattgatgagctgatgcaggccctgaatttcaacagtgagactgtgccacaaaaatcctcccttgaagaaccggatttttataaaactaaaatcaagctctgcatacttcttcatgctttcagaattcgggcagtgactattgatagagtgatgagctatctgaatgcttccggaagcggagagggcagaggaagtctgctaacatgcggtgacgtcgaggagaatcctggacctaagaaaagtggtgttcttttcctcttgggcatcatcttgctggttctgattggagtgcaaggaaccccagtagtgagaaagggtcgctgttcctgcatcagcaccaaccaagggactatccacctacaatccttgaaagaccttaaacaatttgccccaagcccttcctgcgagaaaattgaaatcattgctacactgaagaatggagttcaaacatgtctaaacccagattcagcagatgtgaaggaactgattaaaaagtgggagaaacaggtcagccaaaagaaaaagcaaaagaatgggaaaaaacatcaaaaaaagaaagttctgaaagttcgaaaatctcaacgttctcgtcaaaagaagactacaggaagcggagctactaacttcagcctgctgaagcaggctggagacgtggaggagaaccctggacctgccttgacctttgctttactggtggccctcctggtgctcagctgcaagtcaagctgctctgtgggctgtgatctgcctcaaacccacagcctgggtagcaggaggaccttgatgctcctggcacagatgaggagaatctctcttttctcctgcttgaaggacagacatgactttggatttccccaggaggagtttggcaaccagttccaaaaggctgaaaccatccctgtcctccatgagatgatccagcagatcttcaatctcttcagcacaaaggactcatctgctgcttgggatgagaccctcctagacaaattctacactgaactctaccagcagctgaatgacctggaagcctgtgtgatacagggggtgggggtgacagagactcccctgatgaaggaggactccattctggctgtgaggaaatacttccaaagaatcactctctatctgaaagagaagaaatacagcccttgtgcctgggaggttgtcagagcagaaatcatgagatctttttctttgtcaacaaacttgcaagaaagtttaagaagtaaggaataagctagcttgactgactgagatacagcgtaccttcagctcacagacatgataagatacattgatgagtttggacaaaccacaactagaatgcagtgaaaaaaatgctttatttgtgaaatttgtgatgctattgctttatttgtaaccattataagctgcaataaacaagttaacaacaacaattgcattcattttatgtttcaggttcagggggaggtgtgggaggttttttaaagcaagtaaaacctctacaaatgtggtagtcgtcagctatcctgcaggaacttgtttatttgaaaatcaattcacaaaatccgagtagttattttgcctcccccttcccatttaacagaatacaccaatctctccccacgcacagctttaaacatttggataccattagatatagacatggttttagattccacattccaaacagtttcagagcgagccaatctggggtcagtgatagataaaaatccatcgggatagtcttttaaagcgctttcacagtccaactgctgcggatgcgactccggagtctggatcacggtcatctggaagaagaacgatgggaatcataatccgaaaacggtatcggacgattgtgtctcatcaaacccacaagcagccgctgtctgcgtcgctccgtgcgactgctgtttatgggatcagggtccacagtgtcctgaagcatgattttaatagcccttaacatcaactttctggtgcgatgcgcgcagcaacgcattctgatttcactcaaatctttgcagtaggtacaacacattattacaatattgtttaataaaccataattaaaagcgctccagccaaaactcatatctgatataatcgcccctgcatgaccatcataccaaagtttaatataaattaaatgacgttccctcaaaaacacactacccacatacatgatctcttttggcatgtgcatattaacaatctgtctgtaccatggacaacgttggttaatcatgcaacccaatataaccttccggaaccacactgccaacaccgctcccccagccatgcattgaagtgaaccctgctgattacaatgacaatgaagaacccaattctctcgaccgtgaatcacttgagaatgaaaaatatctatagtggcacaacatagacataaatgcatgcatcttctcataatttttaactcctcaggatttagaaacatatcccagggaataggaagctcttgcagaacagtaaagctggcagaacaaggaagaccacgaacacaacttacactatgcatagtcatagtatcacaatctggcaacagcgggtggtcttcagtcatagaagctcgggtttcattttcctcacaacgtggtaactgggctctggtgtaagggtgatgtctggcgcatgatgtcgagcgtgcgcgcaaccttgtcataatggagttgcttcctgacattctcgtattttgtatagcaaaacgcggccctggcagaacacactcttcttcgccttctatcctgccgcttagcgtgttccgtgtgatagttcaagtacaaccacactcttaagttggtcaaaagaatgctggcttcagttgtaatcaaaactccatcgcatctaatcgttctgaggaaatcatccaagcaatgcaactggattgtgtttcaagcaggagaggagagggaagagacggaagaaccatgttaatttttattccaaacgatctcgcagtacttcaaattgtagatcgcgcagatggcatctctcgcccccactgtgttggtgaaaaagcacagctagatcaaaagaaatgcgattttcaaggtgctcaacggtggcttccagcaaagcctccacgcgcacatccaagaacaaaagaataccaaaagaaggagcattttctaactcctcaatcatcatattacattcctgcaccattcccagataattttcagctttccagccttgaattattcgtgtcagttcttgtggtaaatccaatccacacattacaaacaggtcccggagggcgccctccaccaccattcttaaacacaccctcataatgacaaaatatcttgctcctgtgtcacctgtagcgaattgagaatggcaacatcaattgacatgcccttggctctaagttcttctttaagttctagttgtaaaaactctctcatattatcaccaaactgcttagccagaagccccccgggaacaagagcaggggacgctacagtgcagtacaagcgcagacctccccaattggctccagcaaaaacaagattggaataagcatattgggaaccgccagtaatatcatcgaagttgctggaaatataatcaggcagagtttcttgtaaaaattgaataaaagaaaaatttgccaaaaaaacattcaaaacctctgggatgcaaatgcaataggttaccgcgctgcgctccaacattgttagttttgaattagtctgcaaaaataaaaaaaaaaacaagcgtcatatcatagtagcctgacgaacagatggataaatcagtctttccatcacaagacaagccacagggtctccagctcgaccctcgtaaaacctgtcatcatgattaaacaacagcaccgaaagttcctcgcggtgaccagcatgaataattcttgatgaagcatacaatccagacatgttagcatcagttaacgagaaaaaacagccaacatagcctttgggtataattatgcttaatcgtaagtatagcaaagccacccctcgcggatacaaagtaaaaggcacaggagaataaaaaatataattatttctctgctgctgttcaggcaacgtcgcccccggtccctctaaatacacatacaaagcctcatcagccatggcttaccagacaaagtacagcgggcacacaaagcacaagctctaaagtgactctccaacctctccacaatatatatatacacaagccctaaactgacgtaatgggagtaaagtgtaaaaaatcccgccaaacccaacacacaccccgaaactgcgtcaccagggaaaagtacagtttcacttccgcaatcccaacaggcgtaacttcctctttctcacggtacgtgatatcccactaacttgcaacgtcattttcccacggtcgcaccgccccttttagccgttaaccccacagccaatcaccacacgatccacactttttaaaatcacctcatttacatattggcaccattccatctataaggtatattatatagataga

SEQ ID NO: 89 - DNA, 33556 bp, Artificial Sequence
  Genome sequence of NG-740 virus
tctatctatataatataccttatagatggaatggtgccaatatgtaaatgaggtgattttaaaaagtgtggatcgtgtggtgattggctgtggggttaacggctaaaaggggcggtgcgaccgtgggaaaatgacgttttgtgggggtggagtttttttgcaagttgtcgcgggaaatgtgacgcataaaaaggcttttttctcacggaactacttagttttcccacggtatttaacaggaaatgaggtagttttgaccggatgcaagtgaaaattgttgattttcgcgcgaaaactgaatgaggaagtgtttttctgaataatgtggtatttatggcagggtggagtatttgttcagggccaggtagactttgacccattacgtggaggtttcgattaccgtgttttttacctgaatttccgcgtaccgtgtcaaagtcttctgtttttacgtaggtgtcagctgatcgctagggtatttatacctcagggtttgtgtcaagaggccactcttgagtgccagcgagaagagttttctcctctgcgccggcagtttaataataaaaaaatgagagatttgcgatttctgcctcaggaaataatctctgctgagactggaaatgaaatattggagcttgtggtgcacgccctgatgggagacgatccggagccacctgtgcagctttttgagcctcctacgcttcaggaactgtatgatttagaggtagagggatcggaggattctaatgaggaagctgtaaatggcttttttaccgattctatgcttttagctgctaatgaagggttagaattagatccgcctttggacacttttgatactccaggggtaattgtggaaagcggtacaggtgtaagaaaattacctgatttgagttccgtggactgtgatttgcactgctatgaagacgggtttcctccgagtgatgaggaggaccatgaaaaggagcagtccatgcagactgcagcgggtgagggagtgaaggctgccaatgttggttttcagttggattgcccggagcttcctggacatggctgtaagtcttgtgaatttcacaggaaaaatactggagtaaaggaactgttatgttcgctttgttatatgagaacgcactgccactttatttacagtaagtgtgtttaagttaaaatttaaaggaatatgctgtttttcacatgtatattgagtgtgagttttgtgcttcttattataggtcctgtgtctgatgctgatgaatcaccatctcctgattctactacctcacctcctgagattcaagcacctgttcctgtggacgtgcgcaagcccattcctgtgaagcttaagcctgggaaacgtccagcagtggaaaaacttgaggacttgttacagggtggggacggacctttggacttgagtacacggaaacgtccaagacaataagtgttccatatccgtgtttacttaaggtgacgtcaatatttgtgtgacagtgcaatgtaataaaaatatgttaactgttcactggtttttattgctttttgggcggggactcaggtatataagtagaagcagacctgtgtggttagctcataggagctggctttcatccatggaggtttgggccattttggaagaccttaggaagactaggcaactgttagagaacgcttcggacggagtctccggtttttggagattctggttcgctagtgaattagctagggtagtttttaggataaaacaggactataaacaagaatttgaaaagttgttggtagattgcccaggactttttgaagctcttaatttgggccatcaggttcactttaaagaaaaagttttatcagttttagacttttcaaccccaggtagaactgctgctgctgtggcttttcttacttttatattagataaatggatcccgcagactcatttcagcaggggatacgttttggatttcatagccacagcattgtggagaacatggaaggttcgcaagatgaggacaatcttaggttactggccagtgcagcctttgggtgtagcgggaatcctgaggcatccaccggtcatgccagcggttctggaggaggaacagcaagaggacaacccgagagccggcctggaccctccagtggaggaggcggagtagctgacttgtctcctgaactgcaacgggtgcttactggatctacgtccactggacgggataggggcgttaagagggagagggcatctagtggtactgatgctagatctgagttggctttaagtttaatgagtcgcagacgtcctgaaaccatttggtggcatgaggttcagaaagagggaagggatgaagtttctgtattgcaggagaaatattcactggaacaggtgaaaacatgttggttggagcctgaggatgattgggaggtggccattaaaaattatgccaagatagctttgaggcctgataaacagtataagattactagacggattaatatccggaatgcttgttacatatctggaaatggggctgaggtggtaatagatactcaagacaaggcagttattagatgctgcatgatggatatgtggcctggggtagtcggtatggaagcagtaacttttgtaaatgttaagtttaggggagatggttataatggaatagtgtttatggccaataccaaacttatattgcatggttgtagcttttttggtttcaacaatacctgtgtagatgcctggggacaggttagtgtacggggatgtagtttctatgcgtgttggattgccacagctggcagaaccaagagtcaattgtctctgaagaaatgcatatttcaaagatgtaacctgggcattctgaatgaaggcgaagcaagggtccgccactgcgcttctacagatactggatgttttattttgattaagggaaatgccagcgtaaagcataacatgatttgcggtgcttccgatgagaggccttatcaaatgctcacttgtgctggtgggcattgtaatatgctggctactgtgcatattgtttcccatcaacgcaaaaaatggcctgtttttgatcacaatgtgatgacgaagtgtaccatgcatgcaggtgggcgtagaggaatgtttatgccttaccagtgtaacatgaatcatgtgaaagtgttgttggaaccagatgccttttccagaatgagcctaacaggaatttttgacatgaacatgcaaatctggaagatcctgaggtatgatgatacgagatcgagggtacgcgcatgcgaatgcggaggcaagcatgccaggttccagccggtgtgtgtagatgtgactgaagatctcagaccggatcatttggttattgcccgcactggagcagagttcggatccagtggagaagaaactgactaaggtgagtattgggaaaactttggggtgggattttcagatggacagattgagtaaaaatttgttttttctgtcttgcagctgtcatgagtggaaacgcttcttttaaggggggagtcttcagcccttatctgacagggcgtctcccatcctgggcaggagttcgtcagaatgttatgggatctactgtggatggaagacccgtccaacccgccaattcttcaacgctgacctatgctactttaagttcttcacctttggacgcagctgcagctgccgccgccgcttctgttgccgctaacactgtgcttggaatgggttactatggaagcatcatggctaattccacttcctctaataacccttctaccctgactcaggacaagttacttgtccttttggcccagctggaggctttgacccaacgtctgggtgaactttctcagcaggtggtcgagttgcgagtacaaactgagtctgctgtcggcacggcaaagtctaaataaaaaaatcccagaatcaatgaataaataaacaagcttgttgttgatttaaaatcaagtgtttttatttcatttttcgcgcacggtatgccctagaccaccgatctctatcattgagaactcggtggattttttccaggatcctatagaggtgggattgaatgtttagatacatgggcattaggccgtctttggggtggagatagctccattgaagggattcatgctccggggtagtgttgtaaatcacccagtcataacaaggtcgcagtgcatggtgttgcacaatatcttttagaagtaggctgattgccacagataagcccttggtgtaggtgtttacaaaccggttgagctgggatgggtgcattcggggtgaaattatgtgcattttggattggatttttaagttggcaatattgccgccaagatcccgtcttgggttcatgttatgaaggaccaccaagacggtgtatccggtacatttaggaaatttatcgtgcagcttggatggaaaagcgtggaaaaatttggagacacccttgtgtcctccaagattttccatgcactcatccatgataatagcaatggggccgtgggcagcggcgcgggcaaacacgttccgtgggtctgacacatcatagttatgttcctgagttaaatcatcataagccattttaatgaatttggggcggagagtaccagattggggtatgaatgttccttcgggccccggagcatagttcccctcacagatttgcatttcccaagctttcagttccgagggtggaatcatgtccacctggggggctatgaaaaacaccgtttctggggcgggggtgattaattgtgatgatagcaaatttctgagcaattgagatttgccacatccggtggggccataaatgattccgattacgggttgcaggtggtagtttagggaacggcaactgccgtcttctcgaagcaagggggccacctcgttcatcatttcccttacatgcatattttcccgcaccaaatccattaggaggcgctctcctcctagtgatagaagttcttgtagtgaggaaaagtttttcagcggtttcagaccgtcagccatgggcattttggagagagtttgctgcaaaagttctagtctgttccacagttcagtgatgtgttctatggcatctcgatccagcagacctcctcgtttcgcgggtttggacggctcctggaatagggtatgagacgatgggcgtccagcgctgccagggttcggtccttccagggtctcagtgttcgagtcagggttgtttccgtcacagtgaaggggtgtgcgcctgcttgggcgcttgccagggtgcgcttcagactcatcctgctggtcgaaaacttctgtcgcttggcgccctgtatgtcggccaagtagcagtttaccatgagttcgtagttgagcgcctcggctgcgtggcctttggcgcggagcttacctttggaagttttcttgcataccgggcagtataggcatttcagcgcatacaacttgggcgcaaggaaaacggattctggggagtatgcatctgcgccgcaggaggcgcaaacagtttcacattccaccagccaggttaaatccggttcattggggtcaaaaacaagttttccgccatattttttgatgcgtttcttacctttggtctccatgagttcgtgtcctcgttgagtgacaaacaggctgtccgtgtccccgtagactgattttacaggcctcttctccagtggagtgcctcggtcttcttcgtacaggaactctgaccactctgatacaaaggcgcgcgtccaggccagcacaaaggaggctatgtgggaggggtagcgatcgttgtcaaccagggggtccaccttttccaaagtatgcaaacacatgtcaccctcttcaacatccaggaatgtgattggcttgtaggtgtatttcacgtgacctggggtccccgctgggggggtataaaagggggcggttctttgctcttcctcactgtcttccggatcgctgtccaggaacgtcagctgttggggtaggtattccctctcgaaggcgggcatgacctctgcactcaggttgtcagtttctaagaacgaggaggatttgatattgacagtgccggttgagatgcctttcatgaggttttcgtccatctggtcagaaaacacaatttttttattgtcaagtttggtggcaaatgatccatacagggcgttggataaaagtttggcaatggatcgcatggtttggttcttttccttgtccgcgcgctctttggcggcgatgttgagttggacatactcgcgtgccaggcacttccattcggggaagatagttgttaattcatctggcacgattctcacttgccaccctcgattatgcaaggtaattaaatccacactggtggccacctcgcctcgaaggggttcattggtccaacagagcctacctcctttcctagaacagaaagggggaagtgggtctagcataagttcatcgggagggtctgcatccatggtaaagattcccggaagtaaatccttatcaaaatagctgatgggagtggggtcatctaaggccatttgccattctcgagctgccagtgcgcgctcatatgggttaaggggactgccccatggcatgggatgggtgagtgcagaggcatacatgccacagatgtcatagacgtagatgggatcctcaaagatgcctatgtaggttggatagcatcgcccccctctgatacttgctcgcacatagtcatatagttcatgtgatggcgctagcagccccggacccaagttggtgcgattgggtttttctgttctgtagacgatctggcgaaagatggcgtgagaattggaagagatggtgggtctttgaaaaatgttgaaatgggcatgaggtagacctacagagtctctgacaaagtgggcataagattcttgaagcttggttaccagttcggcggtgacaagtacgtctagggcgcagtagtcaagtgtttcttgaatgatgtcataacctggttggtttttcttttcccacagttcgcggttgagaaggtattcttcgcgatccttccagtactcttctagcggaaacccgtctttgtctgcacggtaagatcctagcatgtagaactgattaactgccttgtaagggcagcagcccttctctacgggtagagagtatgcttgagcagcttttcgtagcgaagcgtgagtaagggcaaaggtgtctctgaccatgactttgaggaattggtatttgaagtcgatgtcgtcacaggctccctgttcccagagttggaagtctacccgtttcttgtaggcggggttgggcaaagcgaaagtaacatcattgaagagaatcttgccggccctgggcatgaaattgcgagtgatgcgaaaaggctgtggtacttccgctcggttattgataacctgggcagctaggacgatctcgtcgaaaccgttgatgttgtgtcctacgatgtataattctatgaaacgcggcgtgcctctgacgtgaggtagcttactgagctcatcaaaggttaggtctgtggggtcagataaggcgtagtgttcgagagcccattcgtgcaggtgaggattcgctttaaggaaggaggaccagaggtccactgccagtgctgtttgtaactggtcccggtactgacgaaaatgccgtccgactgccattttttctggggtgacgcaatagaaggtttgggggtcctgccgccagcgatcccacttgagttttatggcgaggtcataggcgatgttgacgagccgctggtctccagagagtttcatgaccagcatgaaggggattagctgcttgccaaaggaccccatccaggtgtaggtttccacatcgtaggtgagaaagagcctttctgtgcgaggatgagagccaatcgggaagaactggatctcctgccaccagttggaggaatggctgttgatgtgatggaagtagaactccctgcgacgcgccgagcattcatgcttgtgcttgtacagacggccgcagtagtcgcagcgttgcacgggttgtatctcgtgaatgagttgtacctggcttcccttgacgagaaatttcagtgggaagccgaggcctggcgattgtatctcgtgctttactatgttgtctgcatcggcctgttcatcttctgtctcgatggtggtcatgctgacgagccctcgcgggaggcaagtccagacctcggcgcggcaggggcggagctcgaggacgagagcgcgcaggctggagctgtccagggtcctgagacgctgcggactcaggttagtaggcagtgtcaggagattaacttgcatgatcttttggagggcgtgcgggaggttcagatagtacttgatctcaacgggtccgttggtggagatgtcgatggcttgcagggttccgtgtcccttgggcgctaccaccgtgcccttgtttttcattttggacggcggtggctctgttgcttcttgcatgtttagaagcggtgtcgagggcgcgcaccgggcggcaggggcggctcgggacccggcggcatggctggcagtggtacgtcggcgccgcgcgcgggtaggttctggtactgcgccctgagaagactcgcatgcgcgacgacgcggcggttgacatcctggatctgacgcctctgggtgaaagctaccggccccgtgagcttgaacctgaaagagagttcaacagaatcaatctcggtatcgttgacggcggcttgcctaaggatttcttgcacgtcaccagagttgtcctggtaggcgatctccgccatgaactgctcgatctcttcctcttgaagatctccgcggcccgctctctcgacggtggccgcgaggtcgttggagatgcgcccaatgagttgagagaatgcattcatgcccgcctcgttccagacgcggctgtagaccacggcccccacgggatctctcgcgcgcatgaccacctgggcgaggttgagctccacgtggcgggtgaagaccgcatagttgcataggcgctggaaaaggtagttgagtgtggtggcgatgtgctcggtgacgaagaaatacatgatccatcgtctcagcggcatctcgctgacatcgcccagagcttccaagcgctccatggcctcgtagaagtccacggcaaaattaaaaaactgggagtttcgcgcggacacggtcaactcctcttccagaagacggataagttcggcgatggtggtgcgcacctcgcgctcgaaagcccctgggatttcttcctcaatctcttcttcttccactaacatctcttcctcttcaggtggggctgcaggaggagggggaacgcggcgacgccggcggcgcacgggcagacggtcgatgaatctttcaatgacctctccgcggcggcggcgcatggtttcagtgacggcgcggccgttctcgcgcggtcgcagagtaaaaacaccgccgcgcatctccttaaagtggtgactgggaggttctccgtttgggagggagagggcgctgattatacattttattaattggcccgtagggactgcacgcagagatctgatcgtgtcaagatccacgggatctgaaaacctttcgacgaaagcgtctaaccagtcacagtcacaaggtaggctgagtacggcttcttgtgggcgggggtggttatgtgttcggtctgggtcttctgtttcttcttcatctcgggaaggtgagacgatgctgctggtgatgaaattaaagtaggcagttctaagacggcggatggtggcgaggagcaccaggtctttgggtccggcttgctggatacgcaggcgattggccattccccaagcattatcctgacatctagcaagatctttgtagtagtcttgcatgagccgttctacgggcacttcttcctcacccgttctgccatgcatacgtgtgagtccaaatccgcgcattggttgtaccagtgccaagtcagctacgactctttcggcgaggatggcttgctgtacttgggtaagggtggcttgaaagtcatcaaaatccacaaagcggtggtaagctcctgtattaatggtgtaagcacagttggccatgactgaccagttaactgtctggtgaccagggcgcacgagctcggtgtatttaaggcgcgaataggcgcgggtgtcaaagatgtaatcgttgcaggtgcgcaccagatactggtaccctataagaaaatgcggcggtggttggcggtagagaggccatcgttctgtagctggagcgccaggggcgaggtcttccaacataaggcggtgatagccgtagatgtacctggacatccaggtgattcctgcggcggtagtagaagcccgaggaaactcgcgtacgcggttccaaatgttgcgtagcggcatgaagtagttcattgtaggcacggtttgaccagtgaggcgcgcgcagtcattgatgctctatagacacggagaaaatgaaagcgttcagcgactcgactccgtagcctggaggaacgtgaacgggttgggtcgcggtgtaccccggttcgagacttgtactcgagccggccggagccgcggctaacgtggtattggcactcccgtctcgacccagcctacaaaaatccaggatacggaatcgagtcgttttgctggtttccgaatggcagggaagtgagtcctattttttttttttgccgctcagatgcatcccgtgctgcgacagatgcgcccccaacaacagcccccctcgcagcagcagcagcagcaatcacaaaaggctgtccctgcaactactgcaactgccgccgtgagcggtgcgggacagcccgcctatgatctggacttggaagagggcgaaggactggcacgtctaggtgcgccttcacccgagcggcatccgcgagttcaactgaaaaaagattctcgcgaggcgtatgtgccccaacagaacctatttagagacagaagcggcgaggagccggaggagatgcgagcttcccgctttaacgcgggtcgtgagctgcgtcacggtttggaccgaagacgagtgttgcgggacgaggatttcgaagttgatgaaatgacagggatcagtcctgccagggcacacgtggctgcagccaaccttgtatcggcttacgagcagacagtaaaggaagagcgtaacttccaaaagtcttttaataatcatgtgcgaaccctgattgcccgcgaagaagttacccttggtttgatgcatttgtgggatttgatggaagctatcattcagaaccctactagcaaacctctgaccgcccagctgtttctggtggtgcaacacagcagagacaatgaggctttcagagaggcgctgctgaacatcaccgaacccgaggggagatggttgtatgatcttatcaacattctacagagtatcatagtgcaggagcggagcctgggcctggccgagaaggtggctgccatcaattactcggttttgagcttgggaaaatattacgctcgcaaaatctacaagactccatacgttcccatagacaaggaggtgaagatagatgggttctacatgcgcatgacgctcaaggtcttgaccctgagcgatgatcttggggtgtatcgcaatgacagaatgcatcgcgcggttagcgccagcaggaggcgcgagttaagcgacagggaactgatgcacagtttgcaaagagctctgactggagctggaaccgagggtgagaattacttcgacatgggagctgacttgcagtggcagcctagtcgcagggctctgagcgccgcgacggcaggatgtgagcttccttacatagaagaggcggatgaaggcgaggaggaagagggcgagtacttggaagactgatggcacaacccgtgttttttgctagatggaacagcaagcaccggatcccgcaatgcgggcggcgctgcagagccagccgtccggcattaactcctcggacgattggacccaggccatgcaacgtatcatggcgttgacgactcgcaaccccgaagcctttagacagcaaccccaggccaaccgtctatcggccatcatggaagctgtagtgccttcccgctctaatcccactcatgagaaggtcctggccatcgtgaacgcgttggtggagaacaaagctattcgtccagatgaggccggactggtatacaacgctctcttagaacgcgtggctcgctacaacagtagcaatgtgcaaaccaatttggaccgtatgataacagatgtacgcgaagccgtgtctcagcgcgaaaggttccagcgtgatgccaacctgggttcgctggtggcgttaaatgctttcttgagtactcagcctgctaatgtgccgcgtggtcaacaggattatactaactttttaagtgctttgagactgatggtatcagaagtacctcagagcgaagtgtatcagtccggtcctgattacttctttcagactagcagacagggcttgcagacggtaaatctgagccaagcttttaaaaaccttaaaggtttgtggggagtgcatgccccggtaggagaaagagcaaccgtgtctagcttgttaactccgaactcccgcctattattactgttggtagctcctttcaccgacagcggtagcatcgaccgtaattcctatttgggttacctactaaacctgtatcgcgaagccatagggcaaagtcaggtggacgagcagacctatcaagaaattacccaagtcagtcgcgctttgggacaggaagacactggcagtttggaagccactctgaacttcttgcttaccaatcggtctcaaaagatccctcctcaatatgctcttactgcggaggaggagaggatccttagatatgtgcagcagagcgtgggattgtttctgatgcaagagggggcaactccgactgcagcactggacatgacagcgcgaaatatggagcccagcatgtatgccagtaaccgacctttcattaacaaactgctggactacttgcacagagctgccgctatgaactctgattatttcaccaatgccatcttaaacccgcactggctgcccccacctggtttctacacgggcgaatatgacatgcccgaccctaatgacggatttctgtgggacgacgtggacagcgatgttttttcacctctttctgatcatcgcacgtggaaaaaggaaggcggcgatagaatgcattcttctgcatcgctgtccggggtcatgggtgctaccgcggctgagcccgagtctgcaagtccttttcctagtctacccttttctctacacagtgtacgtagcagcgaagtgggtagaataagtcgcccgagtttaatgggcgaagaggagtatctaaacgattccttgctcagaccggcaagagaaaaaaatttcccaaacaatggaatagaaagtttggtggataaaatgagtagatggaagacttatgctcaggatcacagagacgagcctgggatcatggggattacaagtagagcgagccgtagacgccagcgccatgacagacagaggggtcttgtgtgggacgatgaggattcggccgatgatagcagcgtgctggacttgggtgggagaggaaggggcaacccgtttgctcatttgcgccctcgcttgggtggtatgttgtaaaaaaaaataaaaaaaaaactcaccaaggccatggcgacgagcgtacgttcgttcttctttattatctgtgtctagtataatgaggcgagtcgtgctaggcggagcggtggtgtatccggagggtcctcctccttcgtacgagagcgtgatgcagcagcagcaggcgacggcggtgatgcaatccccactggaggctccctttgtgcctccgcgatacctggcacctacggagggcagaaacagcattcgttattcggaactggcacctcagtacgataccaccaggttgtatctggtggacaacaagtcggcggacattgcttctctgaactatcagaatgaccacagcaacttcttgaccacggtggtgcaaaacaatgactttacccctacggaagccagcacccagaccattaactttgatgaacgatcgcggtggggcggtcagctaaagaccatcatgcatactaacatgccaaacgtgaacgagtatatgtttagtaacaagttcaaagcgcgtgtgatggtgtccagaaaacctcccgacggtgctgcagttggggatacttatgatcacaagcaggatattttgaaatatgagtggttcgagtttactttgccagaaggcaacttttcagttactatgactattgatttgatgaacaatgccatcatagataattacttgaaagtgggtagacagaatggagtgcttgaaagtgacattggtgttaagttcgacaccaggaacttcaagctgggatgggatcccgaaaccaagttgatcatgcctggagtgtatacgtatgaagccttccatcctgacattgtcttactgcctggctgcggagtggattttaccgagagtcgtttgagcaaccttcttggtatcagaaaaaaacagccatttcaagagggttttaagattttgtatgaagatttagaaggtggtaatattccggccctcttggatgtagatgcctatgagaacagtaagaaagaacaaaaagccaaaatagaagctgctacagctgctgcagaagctaaggcaaacatagttgccagcgactctacaagggttgctaacgctggagaggtcagaggagacaattttgcgccaacacctgttccgactgcagaatcattattggccgatgtgtctgaaggaacggacgtgaaactcactattcaacctgtagaaaaagatagtaagaatagaagctataatgtgttggaagacaaaatcaacacagcctatcgcagttggtatctttcgtacaattatggcgatcccgaaaaaggagtgcgttcctggacattgctcaccacctcagatgtcacctgcggagcagagcaggtctactggtcgcttccagacatgatgaaggatcctgtcactttccgctccactagacaagtcagtaactaccctgtggtgggtgcagagcttatgcccgtcttctcaaagagcttctacaacgaacaagctgtgtactcccagcagctccgccagtccacctcgcttacgcacgtcttcaaccgctttcctgagaaccagattttaatccgtccgccggcgcccaccattaccaccgtcagtgaaaacgttcctgctctcacagatcacgggaccctgccgttgcgcagcagtatccggggagtccaacgtgtgaccgttactgacgccagacgccgcacctgtccctacgtgtacaaggcactgggcatagtcgcaccgcgcgtcctttcaagccgcactttctaaaaaaaaaaaaaatgtccattcttatctcgcccagtaataacaccggttggggtctgcgcgctccaagcaagatgtacggaggcgcacgcaaacgttctacccaacatcctgtccgtgttcgcggacattttcgcgctccatggggcgccctcaagggccgcactcgcgttcgaaccaccgtcgatgatgtaatcgatcaggtggttgccgacgcccgtaattatactcctactgcgcctacatctactgtggatgcagttattgacagtgtagtggctgacgctcgcaactatgctcgacgtaagagccggcgaaggcgcattgccagacgccaccgagctaccactgccatgcgagccgcaagagctctgctacgaagagctagacgcgtggggcgaagagccatgcttagggcggccagacgtgcagcttcgggcgccagcgccggcaggtcccgcaggcaagcagccgctgtcgcagcggcgactattgccgacatggcccaatcgcgaagaggcaatgtatactgggtgcgtgacgctgccaccggtcaacgtgtacccgtgcgcacccgtccccctcgcacttagaagatactgagcagtctccgatgttgtgtcccagcggcgaggatgtccaagcgcaaatacaaggaagaaatgctgcaggttatcgcacctgaagtctacggccaaccgttgaaggatgaaaaaaaaccccgcaaaatcaagcgggttaaaaaggacaaaaaagaagaggaagatggcgatgatgggctggcggagtttgtgcgcgagtttgccccacggcgacgcgtgcaatggcgtgggcgcaaagttcgacatgtgttgagacctggaacttcggtggtctttacacccggcgagcgttcaagcgctacttttaagcgttcctatgatgaggtgtacggggatgatgatattcttgagcaggcggctgaccgattaggcgagtttgcttatggcaagcgtagtagaataacttccaaggatgagacagtgtcgatacccttggatcatggaaatcccacccctagtcttaaaccggtcactttgcagcaagtgttacccgtaactccgcgaacaggtgttaaacgcgaaggtgaagatttgtatcccactatgcaactgatggtacccaaacgccagaagttggaggacgttttggagaaagtaaaagtggatccagatattcaacctgaggttaaagtgagacccattaagcaggtagcgcctggtctgggggtacaaactgtagacattaagattcccactgaaagtatggaagtgcaaactgaacccgcaaagcctactgccacctccactgaagtgcaaacggatccatggatgcccatgcctattacaactgacgccgccggtcccactcgaagatcccgacgaaagtacggtccagcaagtctgttgatgcccaattatgttgtacacccatctattattcctactcctggttaccgaggcactcgctactatcgcagccgaaacagtacctcccgccgtcgccgcaagacacctgcaaatcgcagtcgtcgccgtagacgcacaagcaaaccgactcccggcgccctggtgcggcaagtgtaccgcaatggtagtgcggaacctttgacactgccgcgtgcgcgttaccatccgagtatcatcacttaatcaatgttgccgctgcctccttgcagatatggccctcacttgtcgccttcgcgttcccatcactggttaccgaggaagaaactcgcgccgtagaagagggatgttgggacgcggaatgcgacgctacaggcgacggcgtgctatccgcaagcaattgcggggtggttttttaccagccttaattccaattatcgctgctgcaattggcgcgataccaggcatagcttccgtggcggttcaggcctcgcaacgacattgacattggaaaaaaacgtataaataaaaaaaaaaaaatacaatggactctgacactcctggtcctgtgactatgttttcttagagatggaagacatcaatttttcatccttggctccgcgacacggcacgaagccgtacatgggcacctggagcgacatcggcacgagccaactgaacgggggcgccttcaattggagcagtatctggagcgggcttaaaaattttggctcaaccataaaaacatacgggaacaaagcttggaacagcagtacaggacaggcgcttagaaataaacttaaagaccagaacttccaacaaaaagtagtcgatgggatagcttccggcatcaatggagtggtagatttggctaaccaggctgtgcagaaaaagataaacagtcgtttggacccgccgccagcaaccccaggtgaaatgcaagtggaggaagaaattcctccgccagaaaaacgaggcgacaagcgtccgcgtcccgatttggaagagacgctggtgacgcgcgtagatgaaccgccttcttatgaggaagcaacgaagcttggaatgcccaccactagaccgatagccccaatggccaccggggtgatgaaaccttctcagttgcatcgacccgtcaccttggatttgccccctccccctgctgctactgctgtacccgcttctaagcctgtcgctgccccgaaaccagtcgccgtagccaggtcacgtcccgggggcgctcctcgtccaaatgcgcactggcaaaatactctgaacagcatcgtgggtctaggcgtgcaaagtgtaaaacgccgtcgctgcttttaattaaatatggagtagcgcttaacttgcctatctgtgtatatgtgtcattacacgccgtcacagcagcagaggaaaaaaggaagaggtcgtgcgtcgacgctgagttactttcaagatggccaccccatcgatgctgccccaatgggcatacatgcacatcgccggacaggatgcttcggagtacctgagtccgggtctggtgcagttcgcccgcgccacagacacctacttcaatctgggaaataagtttagaaatcccaccgtagcgccgacccacgatgtgaccaccgaccgtagccagcggctcatgttgcgcttcgtgcccgttgaccgggaggacaatacatactcttacaaagtgcggtacaccctggccgtgggcgacaacagagtgctggatatggccagcacgttctttgacattaggggtgtgttggacagaggtcccagtttcaaaccctattctggtacggcttacaactccctggctcctaaaggcgctccaaatacatctcagtggattgcagaaggtgtaaaaaatacaactggtgaggaacacgtaacagaagaggaaaccaatactactacttacacttttggcaatgctcctgtaaaagctgaagctgaaattacaaaagaaggactcccagtaggtttggaagtttcagatgaagaaagtaaaccgatttatgctgataaaacatatcagccagaacctcagctgggagatgaaacttggactgaccttgatggaaaaaccgaaaagtatggaggcagggctctcaaacccgatactaagatgaaaccatgctacgggtcctttgccaaacctactaatgtgaaaggcggtcaggcaaaacaaaaaacaacggagcagccaaatcagaaagtcgaatatgatatcgacatggagttttttgatgcggcatcgcagaaaacaaacttaagtcctaaaattgtcatgtatgcagaaaatgtaaatttggaaactccagacactcatgtagtgtacaaacctggaacagaagacacaagttccgaagctaatttgggacaacaatctatgcccaacagacccaactacattggcttcagagataactttattggacttatgtactataacagtactggtaacatgggggtgctggctggtcaagcgtctcagttaaatgcagtggttgacttgcaggacagaaacacagaactttcttaccaactcttgcttgactctctgggcgacagaaccagatactttagcatgtggaatcaggctgtggacagttatgatcctgatgtacgtgttattgaaaatcatggtgtggaagatgaacttcccaactactgttttccactggacggcataggtgttccaacaaccagttacaaatcaatagttccaaatggagacaatgcgcctaattggaaggaacctgaagtaaatggaacaagtgagatcggacagggtaatttgtttgccatggaaattaaccttcaagccaatctatggcgaagtttcctttattccaatgtggctctatatctcccagactcgtacaaatacaccccgtccaatgtcactcttccagaaaacaaaaacacctacgactacatgaacgggcgggtggtgccgccatctctagtagacacctatgtgaacattggtgccaggtggtctctggatgccatggacaatgtcaacccattcaaccaccaccgtaacgctggcttgcgttaccgatccatgcttctgggtaacggacgttatgtgcctttccacatacaagtgcctcaaaaattcttcgctgttaaaaacctgctgcttctcccaggctcctacacttatgagtggaactttaggaaggatgtgaacatggttctacagagttccctcggtaacgacctgcgggtagatggcgccagcatcagtttcacgagcatcaacctctatgctacttttttccccatggctcacaacaccgcttccacccttgaagccatgctgcggaatgacaccaatgatcagtcattcaacgactacctatctgcagctaacatgctctaccccattcctgccaatgcaaccaatattcccatttccattccttctcgcaactgggcggctttcagaggctggtcatttaccagactgaaaaccaaagaaactccctctttggggtctggatttgacccctactttgtctattctggttctattccctacctggatggtaccttctacctgaaccacacttttaagaaggtttccatcatgtttgactcttcagtgagctggcctggaaatgacaggttactatctcctaacgaatttgaaataaagcgcactgtggatggcgaaggctacaacgtagcccaatgcaacatgaccaaagactggttcttggtacagatgctcgccaactacaacatcggctatcagggcttctacattccagaaggatacaaagatcgcatgtattcatttttcagaaacttccagcccatgagcaggcaggtggttgatgaggtcaattacaaagacttcaaggccgtcgccataccctaccaacacaacaactctggctttgtgggttacatggctccgaccatgcgccaaggtcaaccctatcccgctaactatccctatccactcattggaacaactgccgtaaatagtgttacgcagaaaaagttcttgtgtgacagaaccatgtggcgcataccgttctcgagcaacttcatgtctatgggggcccttacagacttgggacagaatatgctctatgccaactcagctcatgctctggacatgacctttgaggtggatcccatggatgagcccaccctgctttatcttctcttcgaagttttcgacgtggtcagagtgcatcagccacaccgcggcatcatcgaggcagtctacctgcgtacaccgttctcggccggtaacgctaccacgtaagaagcttcttgcttcttgcaaatagcagctgcaaccatggcctgcggatcccaaaacggctccagcgagcaagagctcagagccattgtccaagacctgggttgcggaccctattttttgggaacctacgataagcgcttcccggggttcatggcccccgataagctcgcctgtgccattgtaaatacggccggacgtgagacggggggagagcactggttggctttcggttggaacccacgttctaacacctgctacctttttgatccttttggattctcggatgatcgtctcaaacagatttaccagtttgaatatgagggtctcctgcgccgcagcgctcttgctaccaaggaccgctgtattacgctggaaaaatctacccagaccgtgcagggtccccgttctgccgcctgcggacttttctgctgcatgttccttcacgcctttgtgcactggcctgaccgtcccatggacggaaaccccaccatgaaattgctaactggagtgccaaacaacatgcttcattctcctaaagtccagcccaccctgtgtgacaatcaaaaagcactctaccattttcttaatacccattcgccttattttcgctcccatcgtacacacatcgaaagggccactgcgttcgaccgtatggatgttcaataatgactcatgtaaacaacgtgttcaataaacatcactttatttttttacatgtatcaaggctctgcattacttatttatttacaagtcgaatgggttctgacgagaatcagaatgacccgcaggcagtgatacgttgcggaactgatacttgggttgccacttgaattcgggaatcaccaacttgggaaccggtatatcgggcaggatgtcactccacagctttctggtcagctgcaaagctccaagcaggtcaggagccgaaatcttgaaatcacaattaggaccagtgctttgagcgcgagagttgcggtacaccggattgcagcactgaaacaccatcagcgacggatgtctcacgcttgccagcacggtgggatctgcaatcatgcccacatccagatcttcagcattggcaatgctgaacggggtcatcttgcaggtctgcctacccatggcgggcacccaattaggcttgtggttgcaatcgcagtgcagggggatcagtatcatcttggcctgatcctgtctgattcctggatacacggctctcatgaaagcatcatattgcttgaaagcctgctgggctttactaccctcggtataaaacatcccgcaggacctgctcgaaaactggttagctgcacagccggcatcattcacacagcagcgggcgtcattgttagctatttgcaccacacttctgccccagcggttttgggtgattttggttcgctcgggattctcctttaaggctcgttgtccgttctcgctggccacatccatctcgataatctgctccttctgaatcataatattgccatgcaggcacttcagcttgccctcataatcattgcagccatgaggccacaacgcacagcctgtacattcccaattatggtgggcgatctgagaaaaagaatgtatcattccctgcagaaatcttcccatcatcgtgctcagtgtcttgtgactagtgaaagttaactggatgcctcggtgctcctcgtttacgtactggtgacagatgcgcttgtattgttcgtgttgctcaggcattagtttaaaagaggttctaagttcgttatccagcctgtacttctccatcagcagacacatcacttccatgcctttctcccaagcagacaccaggggcaagctaatcggattcttaacagtgcaggcagcagctcctttagccagagggtcatctttagcgatcttctcaatgcttcttttgccatccttctcaacgatgcgcacgggcgggtagctgaaacccactgctacaagttgcgcctcttctctttcttcttcgctgtcttgactgatgtcttgcatggggatatgtttggtcttccttggcttctttttggggggtatcggaggaggaggactgtcgctccgttccggagacagggaggattgtgacgtttcgctcaccattaccaactgactgtcggtagaagaacctgaccccacacggcgacaggtgtttctcttcgggggcagaggtggaggcgattgcgaagggctgcggtccgacctggaaggcggatgactggcagaaccccttccgcgttcgggggtgtgctccctgtggcggtcgcttaactgatttccttcgcggctggccattgtgttctcctaggcagagaaacaacagacatggaaactcagccattgctgtcaacatcgccacgagtgccatcacatctcgtcctcagcgacgaggaaaaggagcagagcttaagcattccaccgcccagtcctgccaccacctctaccctagaagataaggaggtcgacgcatctcatgacatgcagaataaaaaagcgaaagagtctgagacagacatcgagcaagacccgggctatgtgacaccggtggaacacgaggaagagttgaaacgctttctagagagagaggatgaaaactgcccaaaacaacgagcagataactatcaccaagatgctggaaatagggatcagaacaccgactacctcatagggcttgacggggaagacgcgctccttaaacatctagcaagacagtcgctcatagtcaaggatgcattattggacagaactgaagtgcccatcagtgtggaagagctcagccgcgcctacgagcttaacctcttttcacctcgtactccccccaaacgtcagccaaacggcacctgcgagccaaatcctcgcttaaacttttatccagcttttgctgtgccagaagtactggctacctatcacatcttttttaaaaatcaaaaaattccagtctcctgccgcgctaatcgcacccgcgccgatgccctactcaatctgggacctggttcacgcttacctgatatagcttccttggaagaggttccaaagatcttcgagggtctgggcaataatgagactcgggccgcaaatgctctgcaaaagggagaaaatggcatggatgagcatcacagcgttctggtggaattggaaggcgataatgccagactcgcagtactcaagcgaagcatcgaggtcacacacttcgcatatcccgctgtcaacctgccccctaaagtcatgacggcggtcatggaccagttactcattaagcgcgcaagtcccctttcagaagacatgcatgacccagatgcctgtgatgagggtaaaccagtggtcagtgatgagcagctaacccgatggctgggcaccgactctcccagggatttggaagagcgtcgcaagcttatgatggccgtggtgctggttaccgtagaactagagtgtctccgacgtttctttaccgattcagaaaccttgcgcaaactcgaagagaatctgcactacacttttagacacggctttgtgcggcaggcatgcaagatatctaacgtggaactcaccaacctggtttcctacatgggtattctgcatgagaatcgcctaggacaaagcgtgctgcacagcaccctgaagggggaagcccgccgtgattacatccgcgattgtgtctatctgtacctgtgccacacgtggcaaaccggcatgggtgtatggcagcaatgtttagaagaacagaacttgaaagagcttgacaagctcttacagaaatctcttaaggttctgtggacagggttcgacgagcgcaccgtcgcttccgacctggcagacctcatcttcccagagcgtctcagggttactttgcgaaacggattgcctgactttatgagccagagcatgcttaacaattttcgctctttcatcctggaacgctccggtatcctgcccgccacctgctgcgcactgccctccgactttgtgcctctcacctaccgcgagtgccccccgccgctatggagtcactgctacctgttccgtctggccaactatctctcctaccactcggatgtgatcgaggatgtgagcggagacggcttgctggagtgtcactgccgctgcaatctgtgcacgccccaccggtccctagcttgcaacccccagttgatgagcgaaacccagataataggcacctttgaattgcaaggccccagcagccaaggcgatgggtcttctcctgggcaaagtttaaaactgaccccgggactgtggacctccgcctacttgcgcaagtttgctccggaagattaccacccctatgaaatcaagttctatgaggaccaatcacagcctccaaaggccgaactttcggcctgcgtcatcacccagggggcaattctggcccaattgcaagccatccaaaaatcccgccaagaatttctactgaaaaagggtaagggggtctaccttgacccccagaccggcgaggaactcaacacaaggttccctcaggatgtcccaacgacgagaaaacaagaagttgaaggtgcagccgccgcccccagaagatatggaggaagattgggacagtcaggcagaggaggcggaggaggacagtctggaggacagtctggaggaagacagtttggaggaggaaaacgaggaggcagaggaggtggaagaagtaaccgccgacaaacagttatcctcggctgcggagacaagcaacagcgctaccatctccgctccgagtcgaggaacccggcggcgtcccagcagtagatgggacgagaccggacgcttcccgaacccaaccagcgcttccaagaccggtaagaaggatcggcagggatacaagtcctggcgggggcataagaatgccatcatctcctgcttgcatgagtgcgggggcaacatatccttcacgcggcgctacttgctattccaccatggggtgaactttccgcgcaatgttttgcattactaccgtcacctccacagcccctactatagccagcaaatcccggcagtctcgacagataaagacagcggcggcgacctccaacagaaaaccagcagcggcagttagaaaatacacaacaagtgcagcaacaggaggattaaagattacagccaacgagccagcgcaaacccgagagttaagaaatcggatctttccaaccctgtatgccatcttccagcagagtcggggtcaagagcaggaactgaaaataaaaaaccgatctctgcgttcgctcaccagaagttgtttgtatcacaagagcgaagatcaacttcagcgcactctcgaggacgccgaggctctcttcaacaagtactgcgcgctgactcttaaagagtaggcagcgaccgcgcttattcaaaaaaggcgggaattacatcatcctcgacatgagtaaagaaattcccacgccttacatgtggagttatcaaccccaaatgggattggcggcaggcgcctcccaggactactccacccgcatgaattggctcagcgccgggccttctatgatttctcgagttaatgatatacgcgcctaccgaaaccaaatacttttggaacagtcagctcttaccaccacgccccgccaacaccttaatcccagaaattggcccgccgccctagtgtaccaggaaagtcccgctcccaccactgtattacttcctcgagacgcccaggccgaagtccaaatgactaatgcaggtgcgcagttagctggcggctccaccctatgtcgtcacaggcctcggcataatataaaacgcctgatgatcagaggccgaggtatccagctcaacgacgagtcggtgagctctccgcttggtctacgaccagacggaatctttcagattgccggctgcgggagatcttccttcacccctcgtcaggctgttctgactttggaaagttcgtcttcgcaaccccgctcgggcggaatcgggaccgttcaatttgtggaggagtttactccctctgtctacttcaaccccttctccggatctcctgggcattacccggacgagttcataccgaacttcgacgcgattagcgagtcagtggacggctacgattgatgtctggtgacgcggctgagctatctcggctgcgacatctagaccactgccgccgctttcgctgctttgcccgggaactcattgagttcatctacttcgaactccccaaggatcaccctcaaggtccggcccacggagtgcggatttctatcgaaggcaaaatagactctcgcctgcaacgaattttctcccagcggcccgtgctgatcgagcgagaccagggaaacaccacggtttccatctactgcatttgtaatcaccccggattgcatgaaagcctttgctgtcttatgtgtactgagtttaataaaaactgaattaagactctcctacggactgccgcttcttcaacccggattttacaaccagaagaacgaaacttttcctgtcgtccaggactctgttaacttcacctttcctactcacaaactagaagctcaacgactacaccgcttttccagaagcattttccctactaatactactttcaaaaccggaggtgagctccaaggtcttcctacagaaaacccttgggtggaagcgggccttgtagtgctaggaattcttgcgggtgggcttgtgattattctttgctacctatacacaccttgcttcactttcttagtggtgttgtggtattggtttaaaaaatggggcccatactagtcttgcttgttttactttcgcttttggaaccgggttctgccaattacgatccatgtctagacttcgacccagaaaactgcacacttacttttgcacccgacacaagccgcatctgtggagttcatcgcctctcttacgaacttggcccccaacgacaaaaatttacctgcatggtgggaatcaaccccatagttatcacccagcaaagtggagatactaagggttgcattcactgctcctgcgattccatcgagtgcacctacaccctgctgaagaccctatgcggcctaagagacctgctaccaatgaattaaaaaatgattaataaaaaatcacttacttgaaatcagcaataaggtctctgttgaaattttctcccagcagcacctcacttccctcttcccaactctggtattctaaaccccgttcagcggcatactttctccatactttaaaggggatgtcaaattttagctcctctcctgtacccacaatcttcatgtctttcttcccagatgaccaagagagtccggctcagtgactccttcaaccctgtctacccctatgaagatgaaagcacctcccaacacccctttataaacccagggtttatttccccaaatggcttcacacaaagcccaaacggagttcttactttaaaatgtttaaccccactaacaaccacaggcggatctctacagctaaaagtgggagggggacttacagtggatgacaccaacggttttttgaaagaaaacataagtgccaccacaccactcgttaagactggtcactctataggtttaccactaggagccggattgggaacgaatgaaaataaactttgtatcaaattaggacaaggacttacattcaattcaaacaacatttgcattgatgacaatattaacaccttatggacaggagtcaaccccaccgaagccaactgtcaaatcatgaactccagtgaatctaatgattgcaaattaattctaacactagttaaaactggagcactagtcactgcatttgtttatgttataggagtatctaacaattttaatatgctaactacacacagaaatataaattttactgcagagctgtttttcgattctactggtaatttactaactagactctcatccctcaaaactccacttaatcataaatcaggacaaaacatggctactggtgccattactaatgctaaaggtttcatgcccagcacgactgcctatcctttcaatgataattctagagaaaaagaaaactacatttacggaacttgttactacacagctagtgatcgcactgcttttcccattgacatatctgtcatgcttaaccgaagagcaataaatgacgagacatcatattgtattcgtataacttggtcctggaacacaggagatgccccagaggtgcaaacctctgctacaaccctagtcacctccccatttaccttttactacatcagagaagacgactgacaaataaagtttgcgatcgccaggcccaccatggccccgcggcgggcgcgcggctgccggaccctcggtctcccggcgctgctactgctgctgctgctccggccgccggcgacgcggggcatcacgtgccctccccccatgtccgtggaacacgcagacatctgggtcaagagctacagcttgtactccagggagcggtacatttgtaactctggtttcaagcgtaaagccggcacgtccagcctgacggagtgcgtgttgaacaaggccacgaatgtcgcccactggacaacccccagtctcaaatgcattagagacgaacaaaaactcatctcagaagaggatctggctgtgggccaggacacgcaggaggtcatcgtggtgccacactccttgccctttaaggtggtggtgatctcagccatcctggccctggtggtgctcaccatcatctcccttatcatcctcatcatgctttggcagaagaagccacgtggaagcggagctactaacttcagcctgctgaagcaggctggagacgtggaggagaaccctggacctgactggacctggcgcatcctgttcttggtggcagctgctacgggagctcattccaactgggtgaatgtaataagtgatttgaaaaaaattgaagatcttattcaatctatgcatattgatgctactttatatacggaaagtgatgttcaccccagttgcaaagtaacagcaatgaagtgctttctcttggagttacaagttatttcacttgagtccggagatgcaagtattcatgatacagtagaaaatctgatcatcctagcaaacaacagtttgtcttctaatgggaatgtaacagaatctggatgcaaagaatgtgaggaactggaggaaaaaaatattaaagaatttttgcagagttttgtacatattgtccaaatgttcatcaacacttcttaagctagcttgactgactgagatacagcgtaccttcagctcacagacatgataagatacattgatgagtttggacaaaccacaactagaatgcagtgaaaaaaatgctttatttgtgaaatttgtgatgctattgctttatttgtaaccattataagctgcaataaacaagttaacaacaacaattgcattcattttatgtttcaggttcagggggaggtgtgggaggttttttaaagcaagtaaaacctctacaaatgtggtagtcgtcagctatcctgcaggaacttgtttatttgaaaatcaattcacaaaatccgagtagttattttgcctcccccttcccatttaacagaatacaccaatctctccccacgcacagctttaaacatttggataccattagatatagacatggttttagattccacattccaaacagtttcagagcgagccaatctggggtcagtgatagataaaaatccatcgggatagtcttttaaagcgctttcacagtccaactgctgcggatgcgactccggagtctggatcacggtcatctggaagaagaacgatgggaatcataatccgaaaacggtatcggacgattgtgtctcatcaaacccacaagcagccgctgtctgcgtcgctccgtgcgactgctgtttatgggatcagggtccacagtgtcctgaagcatgattttaatagcccttaacatcaactttctggtgcgatgcgcgcagcaacgcattctgatttcactcaaatctttgcagtaggtacaacacattattacaatattgtttaataaaccataattaaaagcgctccagccaaaactcatatctgatataatcgcccctgcatgaccatcataccaaagtttaatataaattaaatgacgttccctcaaaaacacactacccacatacatgatctcttttggcatgtgcatattaacaatctgtctgtaccatggacaacgttggttaatcatgcaacccaatataaccttccggaaccacactgccaacaccgctcccccagccatgcattgaagtgaaccctgctgattacaatgacaatgaagaacccaattctctcgaccgtgaatcacttgagaatgaaaaatatctatagtggcacaacatagacataaatgcatgcatcttctcataatttttaactcctcaggatttagaaacatatcccagggaataggaagctcttgcagaacagtaaagctggcagaacaaggaagaccacgaacacaacttacactatgcatagtcatagtatcacaatctggcaacagcgggtggtcttcagtcatagaagctcgggtttcattttcctcacaacgtggtaactgggctctggtgtaagggtgatgtctggcgcatgatgtcgagcgtgcgcgcaaccttgtcataatggagttgcttcctgacattctcgtattttgtatagcaaaacgcggccctggcagaacacactcttcttcgccttctatcctgccgcttagcgtgttccgtgtgatagttcaagtacaaccacactcttaagttggtcaaaagaatgctggcttcagttgtaatcaaaactccatcgcatctaatcgttctgaggaaatcatccaagcaatgcaactggattgtgtttcaagcaggagaggagagggaagagacggaagaaccatgttaatttttattccaaacgatctcgcagtacttcaaattgtagatcgcgcagatggcatctctcgcccccactgtgttggtgaaaaagcacagctagatcaaaagaaatgcgattttcaaggtgctcaacggtggcttccagcaaagcctccacgcgcacatccaagaacaaaagaataccaaaagaaggagcattttctaactcctcaatcatcatattacattcctgcaccattcccagataattttcagctttccagccttgaattattcgtgtcagttcttgtggtaaatccaatccacacattacaaacaggtcccggagggcgccctccaccaccattcttaaacacaccctcataatgacaaaatatcttgctcctgtgtcacctgtagcgaattgagaatggcaacatcaattgacatgcccttggctctaagttcttctttaagttctagttgtaaaaactctctcatattatcaccaaactgcttagccagaagccccccgggaacaagagcaggggacgctacagtgcagtacaagcgcagacctccccaattggctccagcaaaaacaagattggaataagcatattgggaaccgccagtaatatcatcgaagttgctggaaatataatcaggcagagtttcttgtaaaaattgaataaaagaaaaatttgccaaaaaaacattcaaaacctctgggatgcaaatgcaataggttaccgcgctgcgctccaacattgttagttttgaattagtctgcaaaaataaaaaaaaaaacaagcgtcatatcatagtagcctgacgaacagatggataaatcagtctttccatcacaagacaagccacagggtctccagctcgaccctcgtaaaacctgtcatcatgattaaacaacagcaccgaaagttcctcgcggtgaccagcatgaataattcttgatgaagcatacaatccagacatgttagcatcagttaacgagaaaaaacagccaacatagcctttgggtataattatgcttaatcgtaagtatagcaaagccacccctcgcggatacaaagtaaaaggcacaggagaataaaaaatataattatttctctgctgctgttcaggcaacgtcgcccccggtccctctaaatacacatacaaagcctcatcagccatggcttaccagacaaagtacagcgggcacacaaagcacaagctctaaagtgactctccaacctctccacaatatatatatacacaagccctaaactgacgtaatgggagtaaagtgtaaaaaatcccgccaaacccaacacacaccccgaaactgcgtcaccagggaaaagtacagtttcacttccgcaatcccaacaggcgtaacttcctctttctcacggtacgtgatatcccactaacttgcaacgtcattttcccacggtcgcaccgccccttttagccgttaaccccacagccaatcaccacacgatccacactttttaaaatcacctcatttacatattggcaccattccatctataaggtatattatatagataga

SEQ ID NO: 90 - DNA, 33541 bp, Artificial Sequence
  Genome sequence of NG-742 virus
tctatctatataatataccttatagatggaatggtgccaatatgtaaatgaggtgattttaaaaagtgtggatcgtgtggtgattggctgtggggttaacggctaaaaggggcggtgcgaccgtgggaaaatgacgttttgtgggggtggagtttttttgcaagttgtcgcgggaaatgtgacgcataaaaaggcttttttctcacggaactacttagttttcccacggtatttaacaggaaatgaggtagttttgaccggatgcaagtgaaaattgttgattttcgcgcgaaaactgaatgaggaagtgtttttctgaataatgtggtatttatggcagggtggagtatttgttcagggccaggtagactttgacccattacgtggaggtttcgattaccgtgttttttacctgaatttccgcgtaccgtgtcaaagtcttctgtttttacgtaggtgtcagctgatcgctagggtatttatacctcagggtttgtgtcaagaggccactcttgagtgccagcgagaagagttttctcctctgcgccggcagtttaataataaaaaaatgagagatttgcgatttctgcctcaggaaataatctctgctgagactggaaatgaaatattggagcttgtggtgcacgccctgatgggagacgatccggagccacctgtgcagctttttgagcctcctacgcttcaggaactgtatgatttagaggtagagggatcggaggattctaatgaggaagctgtaaatggcttttttaccgattctatgcttttagctgctaatgaagggttagaattagatccgcctttggacacttttgatactccaggggtaattgtggaaagcggtacaggtgtaagaaaattacctgatttgagttccgtggactgtgatttgcactgctatgaagacgggtttcctccgagtgatgaggaggaccatgaaaaggagcagtccatgcagactgcagcgggtgagggagtgaaggctgccaatgttggttttcagttggattgcccggagcttcctggacatggctgtaagtcttgtgaatttcacaggaaaaatactggagtaaaggaactgttatgttcgctttgttatatgagaacgcactgccactttatttacagtaagtgtgtttaagttaaaatttaaaggaatatgctgtttttcacatgtatattgagtgtgagttttgtgcttcttattataggtcctgtgtctgatgctgatgaatcaccatctcctgattctactacctcacctcctgagattcaagcacctgttcctgtggacgtgcgcaagcccattcctgtgaagcttaagcctgggaaacgtccagcagtggaaaaacttgaggacttgttacagggtggggacggacctttggacttgagtacacggaaacgtccaagacaataagtgttccatatccgtgtttacttaaggtgacgtcaatatttgtgtgacagtgcaatgtaataaaaatatgttaactgttcactggtttttattgctttttgggcggggactcaggtatataagtagaagcagacctgtgtggttagctcataggagctggctttcatccatggaggtttgggccattttggaagaccttaggaagactaggcaactgttagagaacgcttcggacggagtctccggtttttggagattctggttcgctagtgaattagctagggtagtttttaggataaaacaggactataaacaagaatttgaaaagttgttggtagattgcccaggactttttgaagctcttaatttgggccatcaggttcactttaaagaaaaagttttatcagttttagacttttcaaccccaggtagaactgctgctgctgtggcttttcttacttttatattagataaatggatcccgcagactcatttcagcaggggatacgttttggatttcatagccacagcattgtggagaacatggaaggttcgcaagatgaggacaatcttaggttactggccagtgcagcctttgggtgtagcgggaatcctgaggcatccaccggtcatgccagcggttctggaggaggaacagcaagaggacaacccgagagccggcctggaccctccagtggaggaggcggagtagctgacttgtctcctgaactgcaacgggtgcttactggatctacgtccactggacgggataggggcgttaagagggagagggcatctagtggtactgatgctagatctgagttggctttaagtttaatgagtcgcagacgtcctgaaaccatttggtggcatgaggttcagaaagagggaagggatgaagtttctgtattgcaggagaaatattcactggaacaggtgaaaacatgttggttggagcctgaggatgattgggaggtggccattaaaaattatgccaagatagctttgaggcctgataaacagtataagattactagacggattaatatccggaatgcttgttacatatctggaaatggggctgaggtggtaatagatactcaagacaaggcagttattagatgctgcatgatggatatgtggcctggggtagtcggtatggaagcagtaacttttgtaaatgttaagtttaggggagatggttataatggaatagtgtttatggccaataccaaacttatattgcatggttgtagcttttttggtttcaacaatacctgtgtagatgcctggggacaggttagtgtacggggatgtagtttctatgcgtgttggattgccacagctggcagaaccaagagtcaattgtctctgaagaaatgcatatttcaaagatgtaacctgggcattctgaatgaaggcgaagcaagggtccgccactgcgcttctacagatactggatgttttattttgattaagggaaatgccagcgtaaagcataacatgatttgcggtgcttccgatgagaggccttatcaaatgctcacttgtgctggtgggcattgtaatatgctggctactgtgcatattgtttcccatcaacgcaaaaaatggcctgtttttgatcacaatgtgatgacgaagtgtaccatgcatgcaggtgggcgtagaggaatgtttatgccttaccagtgtaacatgaatcatgtgaaagtgttgttggaaccagatgccttttccagaatgagcctaacaggaatttttgacatgaacatgcaaatctggaagatcctgaggtatgatgatacgagatcgagggtacgcgcatgcgaatgcggaggcaagcatgccaggttccagccggtgtgtgtagatgtgactgaagatctcagaccggatcatttggttattgcccgcactggagcagagttcggatccagtggagaagaaactgactaaggtgagtattgggaaaactttggggtgggattttcagatggacagattgagtaaaaatttgttttttctgtcttgcagctgtcatgagtggaaacgcttcttttaaggggggagtcttcagcccttatctgacagggcgtctcccatcctgggcaggagttcgtcagaatgttatgggatctactgtggatggaagacccgtccaacccgccaattcttcaacgctgacctatgctactttaagttcttcacctttggacgcagctgcagctgccgccgccgcttctgttgccgctaacactgtgcttggaatgggttactatggaagcatcatggctaattccacttcctctaataacccttctaccctgactcaggacaagttacttgtccttttggcccagctggaggctttgacccaacgtctgggtgaactttctcagcaggtggtcgagttgcgagtacaaactgagtctgctgtcggcacggcaaagtctaaataaaaaaatcccagaatcaatgaataaataaacaagcttgttgttgatttaaaatcaagtgtttttatttcatttttcgcgcacggtatgccctagaccaccgatctctatcattgagaactcggtggattttttccaggatcctatagaggtgggattgaatgtttagatacatgggcattaggccgtctttggggtggagatagctccattgaagggattcatgctccggggtagtgttgtaaatcacccagtcataacaaggtcgcagtgcatggtgttgcacaatatcttttagaagtaggctgattgccacagataagcccttggtgtaggtgtttacaaaccggttgagctgggatgggtgcattcggggtgaaattatgtgcattttggattggatttttaagttggcaatattgccgccaagatcccgtcttgggttcatgttatgaaggaccaccaagacggtgtatccggtacatttaggaaatttatcgtgcagcttggatggaaaagcgtggaaaaatttggagacacccttgtgtcctccaagattttccatgcactcatccatgataatagcaatggggccgtgggcagcggcgcgggcaaacacgttccgtgggtctgacacatcatagttatgttcctgagttaaatcatcataagccattttaatgaatttggggcggagagtaccagattggggtatgaatgttccttcgggccccggagcatagttcccctcacagatttgcatttcccaagctttcagttccgagggtggaatcatgtccacctggggggctatgaaaaacaccgtttctggggcgggggtgattaattgtgatgatagcaaatttctgagcaattgagatttgccacatccggtggggccataaatgattccgattacgggttgcaggtggtagtttagggaacggcaactgccgtcttctcgaagcaagggggccacctcgttcatcatttcccttacatgcatattttcccgcaccaaatccattaggaggcgctctcctcctagtgatagaagttcttgtagtgaggaaaagtttttcagcggtttcagaccgtcagccatgggcattttggagagagtttgctgcaaaagttctagtctgttccacagttcagtgatgtgttctatggcatctcgatccagcagacctcctcgtttcgcgggtttggacggctcctggaatagggtatgagacgatgggcgtccagcgctgccagggttcggtccttccagggtctcagtgttcgagtcagggttgtttccgtcacagtgaaggggtgtgcgcctgcttgggcgcttgccagggtgcgcttcagactcatcctgctggtcgaaaacttctgtcgcttggcgccctgtatgtcggccaagtagcagtttaccatgagttcgtagttgagcgcctcggctgcgtggcctttggcgcggagcttacctttggaagttttcttgcataccgggcagtataggcatttcagcgcatacaacttgggcgcaaggaaaacggattctggggagtatgcatctgcgccgcaggaggcgcaaacagtttcacattccaccagccaggttaaatccggttcattggggtcaaaaacaagttttccgccatattttttgatgcgtttcttacctttggtctccatgagttcgtgtcctcgttgagtgacaaacaggctgtccgtgtccccgtagactgattttacaggcctcttctccagtggagtgcctcggtcttcttcgtacaggaactctgaccactctgatacaaaggcgcgcgtccaggccagcacaaaggaggctatgtgggaggggtagcgatcgttgtcaaccagggggtccaccttttccaaagtatgcaaacacatgtcaccctcttcaacatccaggaatgtgattggcttgtaggtgtatttcacgtgacctggggtccccgctgggggggtataaaagggggcggttctttgctcttcctcactgtcttccggatcgctgtccaggaacgtcagctgttggggtaggtattccctctcgaaggcgggcatgacctctgcactcaggttgtcagtttctaagaacgaggaggatttgatattgacagtgccggttgagatgcctttcatgaggttttcgtccatctggtcagaaaacacaatttttttattgtcaagtttggtggcaaatgatccatacagggcgttggataaaagtttggcaatggatcgcatggtttggttcttttccttgtccgcgcgctctttggcggcgatgttgagttggacatactcgcgtgccaggcacttccattcggggaagatagttgttaattcatctggcacgattctcacttgccaccctcgattatgcaaggtaattaaatccacactggtggccacctcgcctcgaaggggttcattggtccaacagagcctacctcctttcctagaacagaaagggggaagtgggtctagcataagttcatcgggagggtctgcatccatggtaaagattcccggaagtaaatccttatcaaaatagctgatgggagtggggtcatctaaggccatttgccattctcgagctgccagtgcgcgctcatatgggttaaggggactgccccatggcatgggatgggtgagtgcagaggcatacatgccacagatgtcatagacgtagatgggatcctcaaagatgcctatgtaggttggatagcatcgcccccctctgatacttgctcgcacatagtcatatagttcatgtgatggcgctagcagccccggacccaagttggtgcgattgggtttttctgttctgtagacgatctggcgaaagatggcgtgagaattggaagagatggtgggtctttgaaaaatgttgaaatgggcatgaggtagacctacagagtctctgacaaagtgggcataagattcttgaagcttggttaccagttcggcggtgacaagtacgtctagggcgcagtagtcaagtgtttcttgaatgatgtcataacctggttggtttttcttttcccacagttcgcggttgagaaggtattcttcgcgatccttccagtactcttctagcggaaacccgtctttgtctgcacggtaagatcctagcatgtagaactgattaactgccttgtaagggcagcagcccttctctacgggtagagagtatgcttgagcagcttttcgtagcgaagcgtgagtaagggcaaaggtgtctctgaccatgactttgaggaattggtatttgaagtcgatgtcgtcacaggctccctgttcccagagttggaagtctacccgtttcttgtaggcggggttgggcaaagcgaaagtaacatcattgaagagaatcttgccggccctgggcatgaaattgcgagtgatgcgaaaaggctgtggtacttccgctcggttattgataacctgggcagctaggacgatctcgtcgaaaccgttgatgttgtgtcctacgatgtataattctatgaaacgcggcgtgcctctgacgtgaggtagcttactgagctcatcaaaggttaggtctgtggggtcagataaggcgtagtgttcgagagcccattcgtgcaggtgaggattcgctttaaggaaggaggaccagaggtccactgccagtgctgtttgtaactggtcccggtactgacgaaaatgccgtccgactgccattttttctggggtgacgcaatagaaggtttgggggtcctgccgccagcgatcccacttgagttttatggcgaggtcataggcgatgttgacgagccgctggtctccagagagtttcatgaccagcatgaaggggattagctgcttgccaaaggaccccatccaggtgtaggtttccacatcgtaggtgagaaagagcctttctgtgcgaggatgagagccaatcgggaagaactggatctcctgccaccagttggaggaatggctgttgatgtgatggaagtagaactccctgcgacgcgccgagcattcatgcttgtgcttgtacagacggccgcagtagtcgcagcgttgcacgggttgtatctcgtgaatgagttgtacctggcttcccttgacgagaaatttcagtgggaagccgaggcctggcgattgtatctcgtgctttactatgttgtctgcatcggcctgttcatcttctgtctcgatggtggtcatgctgacgagccctcgcgggaggcaagtccagacctcggcgcggcaggggcggagctcgaggacgagagcgcgcaggctggagctgtccagggtcctgagacgctgcggactcaggttagtaggcagtgtcaggagattaacttgcatgatcttttggagggcgtgcgggaggttcagatagtacttgatctcaacgggtccgttggtggagatgtcgatggcttgcagggttccgtgtcccttgggcgctaccaccgtgcccttgtttttcattttggacggcggtggctctgttgcttcttgcatgtttagaagcggtgtcgagggcgcgcaccgggcggcaggggcggctcgggacccggcggcatggctggcagtggtacgtcggcgccgcgcgcgggtaggttctggtactgcgccctgagaagactcgcatgcgcgacgacgcggcggttgacatcctggatctgacgcctctgggtgaaagctaccggccccgtgagcttgaacctgaaagagagttcaacagaatcaatctcggtatcgttgacggcggcttgcctaaggatttcttgcacgtcaccagagttgtcctggtaggcgatctccgccatgaactgctcgatctcttcctcttgaagatctccgcggcccgctctctcgacggtggccgcgaggtcgttggagatgcgcccaatgagttgagagaatgcattcatgcccgcctcgttccagacgcggctgtagaccacggcccccacgggatctctcgcgcgcatgaccacctgggcgaggttgagctccacgtggcgggtgaagaccgcatagttgcataggcgctggaaaaggtagttgagtgtggtggcgatgtgctcggtgacgaagaaatacatgatccatcgtctcagcggcatctcgctgacatcgcccagagcttccaagcgctccatggcctcgtagaagtccacggcaaaattaaaaaactgggagtttcgcgcggacacggtcaactcctcttccagaagacggataagttcggcgatggtggtgcgcacctcgcgctcgaaagcccctgggatttcttcctcaatctcttcttcttccactaacatctcttcctcttcaggtggggctgcaggaggagggggaacgcggcgacgccggcggcgcacgggcagacggtcgatgaatctttcaatgacctctccgcggcggcggcgcatggtttcagtgacggcgcggccgttctcgcgcggtcgcagagtaaaaacaccgccgcgcatctccttaaagtggtgactgggaggttctccgtttgggagggagagggcgctgattatacattttattaattggcccgtagggactgcacgcagagatctgatcgtgtcaagatccacgggatctgaaaacctttcgacgaaagcgtctaaccagtcacagtcacaaggtaggctgagtacggcttcttgtgggcgggggtggttatgtgttcggtctgggtcttctgtttcttcttcatctcgggaaggtgagacgatgctgctggtgatgaaattaaagtaggcagttctaagacggcggatggtggcgaggagcaccaggtctttgggtccggcttgctggatacgcaggcgattggccattccccaagcattatcctgacatctagcaagatctttgtagtagtcttgcatgagccgttctacgggcacttcttcctcacccgttctgccatgcatacgtgtgagtccaaatccgcgcattggttgtaccagtgccaagtcagctacgactctttcggcgaggatggcttgctgtacttgggtaagggtggcttgaaagtcatcaaaatccacaaagcggtggtaagctcctgtattaatggtgtaagcacagttggccatgactgaccagttaactgtctggtgaccagggcgcacgagctcggtgtatttaaggcgcgaataggcgcgggtgtcaaagatgtaatcgttgcaggtgcgcaccagatactggtaccctataagaaaatgcggcggtggttggcggtagagaggccatcgttctgtagctggagcgccaggggcgaggtcttccaacataaggcggtgatagccgtagatgtacctggacatccaggtgattcctgcggcggtagtagaagcccgaggaaactcgcgtacgcggttccaaatgttgcgtagcggcatgaagtagttcattgtaggcacggtttgaccagtgaggcgcgcgcagtcattgatgctctatagacacggagaaaatgaaagcgttcagcgactcgactccgtagcctggaggaacgtgaacgggttgggtcgcggtgtaccccggttcgagacttgtactcgagccggccggagccgcggctaacgtggtattggcactcccgtctcgacccagcctacaaaaatccaggatacggaatcgagtcgttttgctggtttccgaatggcagggaagtgagtcctattttttttttttgccgctcagatgcatcccgtgctgcgacagatgcgcccccaacaacagcccccctcgcagcagcagcagcagcaatcacaaaaggctgtccctgcaactactgcaactgccgccgtgagcggtgcgggacagcccgcctatgatctggacttggaagagggcgaaggactggcacgtctaggtgcgccttcacccgagcggcatccgcgagttcaactgaaaaaagattctcgcgaggcgtatgtgccccaacagaacctatttagagacagaagcggcgaggagccggaggagatgcgagcttcccgctttaacgcgggtcgtgagctgcgtcacggtttggaccgaagacgagtgttgcgggacgaggatttcgaagttgatgaaatgacagggatcagtcctgccagggcacacgtggctgcagccaaccttgtatcggcttacgagcagacagtaaaggaagagcgtaacttccaaaagtcttttaataatcatgtgcgaaccctgattgcccgcgaagaagttacccttggtttgatgcatttgtgggatttgatggaagctatcattcagaaccctactagcaaacctctgaccgcccagctgtttctggtggtgcaacacagcagagacaatgaggctttcagagaggcgctgctgaacatcaccgaacccgaggggagatggttgtatgatcttatcaacattctacagagtatcatagtgcaggagcggagcctgggcctggccgagaaggtggctgccatcaattactcggttttgagcttgggaaaatattacgctcgcaaaatctacaagactccatacgttcccatagacaaggaggtgaagatagatgggttctacatgcgcatgacgctcaaggtcttgaccctgagcgatgatcttggggtgtatcgcaatgacagaatgcatcgcgcggttagcgccagcaggaggcgcgagttaagcgacagggaactgatgcacagtttgcaaagagctctgactggagctggaaccgagggtgagaattacttcgacatgggagctgacttgcagtggcagcctagtcgcagggctctgagcgccgcgacggcaggatgtgagcttccttacatagaagaggcggatgaaggcgaggaggaagagggcgagtacttggaagactgatggcacaacccgtgttttttgctagatggaacagcaagcaccggatcccgcaatgcgggcggcgctgcagagccagccgtccggcattaactcctcggacgattggacccaggccatgcaacgtatcatggcgttgacgactcgcaaccccgaagcctttagacagcaaccccaggccaaccgtctatcggccatcatggaagctgtagtgccttcccgctctaatcccactcatgagaaggtcctggccatcgtgaacgcgttggtggagaacaaagctattcgtccagatgaggccggactggtatacaacgctctcttagaacgcgtggctcgctacaacagtagcaatgtgcaaaccaatttggaccgtatgataacagatgtacgcgaagccgtgtctcagcgcgaaaggttccagcgtgatgccaacctgggttcgctggtggcgttaaatgctttcttgagtactcagcctgctaatgtgccgcgtggtcaacaggattatactaactttttaagtgctttgagactgatggtatcagaagtacctcagagcgaagtgtatcagtccggtcctgattacttctttcagactagcagacagggcttgcagacggtaaatctgagccaagcttttaaaaaccttaaaggtttgtggggagtgcatgccccggtaggagaaagagcaaccgtgtctagcttgttaactccgaactcccgcctattattactgttggtagctcctttcaccgacagcggtagcatcgaccgtaattcctatttgggttacctactaaacctgtatcgcgaagccatagggcaaagtcaggtggacgagcagacctatcaagaaattacccaagtcagtcgcgctttgggacaggaagacactggcagtttggaagccactctgaacttcttgcttaccaatcggtctcaaaagatccctcctcaatatgctcttactgcggaggaggagaggatccttagatatgtgcagcagagcgtgggattgtttctgatgcaagagggggcaactccgactgcagcactggacatgacagcgcgaaatatggagcccagcatgtatgccagtaaccgacctttcattaacaaactgctggactacttgcacagagctgccgctatgaactctgattatttcaccaatgccatcttaaacccgcactggctgcccccacctggtttctacacgggcgaatatgacatgcccgaccctaatgacggatttctgtgggacgacgtggacagcgatgttttttcacctctttctgatcatcgcacgtggaaaaaggaaggcggcgatagaatgcattcttctgcatcgctgtccggggtcatgggtgctaccgcggctgagcccgagtctgcaagtccttttcctagtctacccttttctctacacagtgtacgtagcagcgaagtgggtagaataagtcgcccgagtttaatgggcgaagaggagtatctaaacgattccttgctcagaccggcaagagaaaaaaatttcccaaacaatggaatagaaagtttggtggataaaatgagtagatggaagacttatgctcaggatcacagagacgagcctgggatcatggggattacaagtagagcgagccgtagacgccagcgccatgacagacagaggggtcttgtgtgggacgatgaggattcggccgatgatagcagcgtgctggacttgggtgggagaggaaggggcaacccgtttgctcatttgcgccctcgcttgggtggtatgttgtaaaaaaaaataaaaaaaaaactcaccaaggccatggcgacgagcgtacgttcgttcttctttattatctgtgtctagtataatgaggcgagtcgtgctaggcggagcggtggtgtatccggagggtcctcctccttcgtacgagagcgtgatgcagcagcagcaggcgacggcggtgatgcaatccccactggaggctccctttgtgcctccgcgatacctggcacctacggagggcagaaacagcattcgttattcggaactggcacctcagtacgataccaccaggttgtatctggtggacaacaagtcggcggacattgcttctctgaactatcagaatgaccacagcaacttcttgaccacggtggtgcaaaacaatgactttacccctacggaagccagcacccagaccattaactttgatgaacgatcgcggtggggcggtcagctaaagaccatcatgcatactaacatgccaaacgtgaacgagtatatgtttagtaacaagttcaaagcgcgtgtgatggtgtccagaaaacctcccgacggtgctgcagttggggatacttatgatcacaagcaggatattttgaaatatgagtggttcgagtttactttgccagaaggcaacttttcagttactatgactattgatttgatgaacaatgccatcatagataattacttgaaagtgggtagacagaatggagtgcttgaaagtgacattggtgttaagttcgacaccaggaacttcaagctgggatgggatcccgaaaccaagttgatcatgcctggagtgtatacgtatgaagccttccatcctgacattgtcttactgcctggctgcggagtggattttaccgagagtcgtttgagcaaccttcttggtatcagaaaaaaacagccatttcaagagggttttaagattttgtatgaagatttagaaggtggtaatattccggccctcttggatgtagatgcctatgagaacagtaagaaagaacaaaaagccaaaatagaagctgctacagctgctgcagaagctaaggcaaacatagttgccagcgactctacaagggttgctaacgctggagaggtcagaggagacaattttgcgccaacacctgttccgactgcagaatcattattggccgatgtgtctgaaggaacggacgtgaaactcactattcaacctgtagaaaaagatagtaagaatagaagctataatgtgttggaagacaaaatcaacacagcctatcgcagttggtatctttcgtacaattatggcgatcccgaaaaaggagtgcgttcctggacattgctcaccacctcagatgtcacctgcggagcagagcaggtctactggtcgcttccagacatgatgaaggatcctgtcactttccgctccactagacaagtcagtaactaccctgtggtgggtgcagagcttatgcccgtcttctcaaagagcttctacaacgaacaagctgtgtactcccagcagctccgccagtccacctcgcttacgcacgtcttcaaccgctttcctgagaaccagattttaatccgtccgccggcgcccaccattaccaccgtcagtgaaaacgttcctgctctcacagatcacgggaccctgccgttgcgcagcagtatccggggagtccaacgtgtgaccgttactgacgccagacgccgcacctgtccctacgtgtacaaggcactgggcatagtcgcaccgcgcgtcctttcaagccgcactttctaaaaaaaaaaaaaatgtccattcttatctcgcccagtaataacaccggttggggtctgcgcgctccaagcaagatgtacggaggcgcacgcaaacgttctacccaacatcctgtccgtgttcgcggacattttcgcgctccatggggcgccctcaagggccgcactcgcgttcgaaccaccgtcgatgatgtaatcgatcaggtggttgccgacgcccgtaattatactcctactgcgcctacatctactgtggatgcagttattgacagtgtagtggctgacgctcgcaactatgctcgacgtaagagccggcgaaggcgcattgccagacgccaccgagctaccactgccatgcgagccgcaagagctctgctacgaagagctagacgcgtggggcgaagagccatgcttagggcggccagacgtgcagcttcgggcgccagcgccggcaggtcccgcaggcaagcagccgctgtcgcagcggcgactattgccgacatggcccaatcgcgaagaggcaatgtatactgggtgcgtgacgctgccaccggtcaacgtgtacccgtgcgcacccgtccccctcgcacttagaagatactgagcagtctccgatgttgtgtcccagcggcgaggatgtccaagcgcaaatacaaggaagaaatgctgcaggttatcgcacctgaagtctacggccaaccgttgaaggatgaaaaaaaaccccgcaaaatcaagcgggttaaaaaggacaaaaaagaagaggaagatggcgatgatgggctggcggagtttgtgcgcgagtttgccccacggcgacgcgtgcaatggcgtgggcgcaaagttcgacatgtgttgagacctggaacttcggtggtctttacacccggcgagcgttcaagcgctacttttaagcgttcctatgatgaggtgtacggggatgatgatattcttgagcaggcggctgaccgattaggcgagtttgcttatggcaagcgtagtagaataacttccaaggatgagacagtgtcgatacccttggatcatggaaatcccacccctagtcttaaaccggtcactttgcagcaagtgttacccgtaactccgcgaacaggtgttaaacgcgaaggtgaagatttgtatcccactatgcaactgatggtacccaaacgccagaagttggaggacgttttggagaaagtaaaagtggatccagatattcaacctgaggttaaagtgagacccattaagcaggtagcgcctggtctgggggtacaaactgtagacattaagattcccactgaaagtatggaagtgcaaactgaacccgcaaagcctactgccacctccactgaagtgcaaacggatccatggatgcccatgcctattacaactgacgccgccggtcccactcgaagatcccgacgaaagtacggtccagcaagtctgttgatgcccaattatgttgtacacccatctattattcctactcctggttaccgaggcactcgctactatcgcagccgaaacagtacctcccgccgtcgccgcaagacacctgcaaatcgcagtcgtcgccgtagacgcacaagcaaaccgactcccggcgccctggtgcggcaagtgtaccgcaatggtagtgcggaacctttgacactgccgcgtgcgcgttaccatccgagtatcatcacttaatcaatgttgccgctgcctccttgcagatatggccctcacttgtcgccttcgcgttcccatcactggttaccgaggaagaaactcgcgccgtagaagagggatgttgggacgcggaatgcgacgctacaggcgacggcgtgctatccgcaagcaattgcggggtggttttttaccagccttaattccaattatcgctgctgcaattggcgcgataccaggcatagcttccgtggcggttcaggcctcgcaacgacattgacattggaaaaaaacgtataaataaaaaaaaaaaaatacaatggactctgacactcctggtcctgtgactatgttttcttagagatggaagacatcaatttttcatccttggctccgcgacacggcacgaagccgtacatgggcacctggagcgacatcggcacgagccaactgaacgggggcgccttcaattggagcagtatctggagcgggcttaaaaattttggctcaaccataaaaacatacgggaacaaagcttggaacagcagtacaggacaggcgcttagaaataaacttaaagaccagaacttccaacaaaaagtagtcgatgggatagcttccggcatcaatggagtggtagatttggctaaccaggctgtgcagaaaaagataaacagtcgtttggacccgccgccagcaaccccaggtgaaatgcaagtggaggaagaaattcctccgccagaaaaacgaggcgacaagcgtccgcgtcccgatttggaagagacgctggtgacgcgcgtagatgaaccgccttcttatgaggaagcaacgaagcttggaatgcccaccactagaccgatagccccaatggccaccggggtgatgaaaccttctcagttgcatcgacccgtcaccttggatttgccccctccccctgctgctactgctgtacccgcttctaagcctgtcgctgccccgaaaccagtcgccgtagccaggtcacgtcccgggggcgctcctcgtccaaatgcgcactggcaaaatactctgaacagcatcgtgggtctaggcgtgcaaagtgtaaaacgccgtcgctgcttttaattaaatatggagtagcgcttaacttgcctatctgtgtatatgtgtcattacacgccgtcacagcagcagaggaaaaaaggaagaggtcgtgcgtcgacgctgagttactttcaagatggccaccccatcgatgctgccccaatgggcatacatgcacatcgccggacaggatgcttcggagtacctgagtccgggtctggtgcagttcgcccgcgccacagacacctacttcaatctgggaaataagtttagaaatcccaccgtagcgccgacccacgatgtgaccaccgaccgtagccagcggctcatgttgcgcttcgtgcccgttgaccgggaggacaatacatactcttacaaagtgcggtacaccctggccgtgggcgacaacagagtgctggatatggccagcacgttctttgacattaggggtgtgttggacagaggtcccagtttcaaaccctattctggtacggcttacaactccctggctcctaaaggcgctccaaatacatctcagtggattgcagaaggtgtaaaaaatacaactggtgaggaacacgtaacagaagaggaaaccaatactactacttacacttttggcaatgctcctgtaaaagctgaagctgaaattacaaaagaaggactcccagtaggtttggaagtttcagatgaagaaagtaaaccgatttatgctgataaaacatatcagccagaacctcagctgggagatgaaacttggactgaccttgatggaaaaaccgaaaagtatggaggcagggctctcaaacccgatactaagatgaaaccatgctacgggtcctttgccaaacctactaatgtgaaaggcggtcaggcaaaacaaaaaacaacggagcagccaaatcagaaagtcgaatatgatatcgacatggagttttttgatgcggcatcgcagaaaacaaacttaagtcctaaaattgtcatgtatgcagaaaatgtaaatttggaaactccagacactcatgtagtgtacaaacctggaacagaagacacaagttccgaagctaatttgggacaacaatctatgcccaacagacccaactacattggcttcagagataactttattggacttatgtactataacagtactggtaacatgggggtgctggctggtcaagcgtctcagttaaatgcagtggttgacttgcaggacagaaacacagaactttcttaccaactcttgcttgactctctgggcgacagaaccagatactttagcatgtggaatcaggctgtggacagttatgatcctgatgtacgtgttattgaaaatcatggtgtggaagatgaacttcccaactactgttttccactggacggcataggtgttccaacaaccagttacaaatcaatagttccaaatggagacaatgcgcctaattggaaggaacctgaagtaaatggaacaagtgagatcggacagggtaatttgtttgccatggaaattaaccttcaagccaatctatggcgaagtttcctttattccaatgtggctctatatctcccagactcgtacaaatacaccccgtccaatgtcactcttccagaaaacaaaaacacctacgactacatgaacgggcgggtggtgccgccatctctagtagacacctatgtgaacattggtgccaggtggtctctggatgccatggacaatgtcaacccattcaaccaccaccgtaacgctggcttgcgttaccgatccatgcttctgggtaacggacgttatgtgcctttccacatacaagtgcctcaaaaattcttcgctgttaaaaacctgctgcttctcccaggctcctacacttatgagtggaactttaggaaggatgtgaacatggttctacagagttccctcggtaacgacctgcgggtagatggcgccagcatcagtttcacgagcatcaacctctatgctacttttttccccatggctcacaacaccgcttccacccttgaagccatgctgcggaatgacaccaatgatcagtcattcaacgactacctatctgcagctaacatgctctaccccattcctgccaatgcaaccaatattcccatttccattccttctcgcaactgggcggctttcagaggctggtcatttaccagactgaaaaccaaagaaactccctctttggggtctggatttgacccctactttgtctattctggttctattccctacctggatggtaccttctacctgaaccacacttttaagaaggtttccatcatgtttgactcttcagtgagctggcctggaaatgacaggttactatctcctaacgaatttgaaataaagcgcactgtggatggcgaaggctacaacgtagcccaatgcaacatgaccaaagactggttcttggtacagatgctcgccaactacaacatcggctatcagggcttctacattccagaaggatacaaagatcgcatgtattcatttttcagaaacttccagcccatgagcaggcaggtggttgatgaggtcaattacaaagacttcaaggccgtcgccataccctaccaacacaacaactctggctttgtgggttacatggctccgaccatgcgccaaggtcaaccctatcccgctaactatccctatccactcattggaacaactgccgtaaatagtgttacgcagaaaaagttcttgtgtgacagaaccatgtggcgcataccgttctcgagcaacttcatgtctatgggggcccttacagacttgggacagaatatgctctatgccaactcagctcatgctctggacatgacctttgaggtggatcccatggatgagcccaccctgctttatcttctcttcgaagttttcgacgtggtcagagtgcatcagccacaccgcggcatcatcgaggcagtctacctgcgtacaccgttctcggccggtaacgctaccacgtaagaagcttcttgcttcttgcaaatagcagctgcaaccatggcctgcggatcccaaaacggctccagcgagcaagagctcagagccattgtccaagacctgggttgcggaccctattttttgggaacctacgataagcgcttcccggggttcatggcccccgataagctcgcctgtgccattgtaaatacggccggacgtgagacggggggagagcactggttggctttcggttggaacccacgttctaacacctgctacctttttgatccttttggattctcggatgatcgtctcaaacagatttaccagtttgaatatgagggtctcctgcgccgcagcgctcttgctaccaaggaccgctgtattacgctggaaaaatctacccagaccgtgcagggtccccgttctgccgcctgcggacttttctgctgcatgttccttcacgcctttgtgcactggcctgaccgtcccatggacggaaaccccaccatgaaattgctaactggagtgccaaacaacatgcttcattctcctaaagtccagcccaccctgtgtgacaatcaaaaagcactctaccattttcttaatacccattcgccttattttcgctcccatcgtacacacatcgaaagggccactgcgttcgaccgtatggatgttcaataatgactcatgtaaacaacgtgttcaataaacatcactttatttttttacatgtatcaaggctctgcattacttatttatttacaagtcgaatgggttctgacgagaatcagaatgacccgcaggcagtgatacgttgcggaactgatacttgggttgccacttgaattcgggaatcaccaacttgggaaccggtatatcgggcaggatgtcactccacagctttctggtcagctgcaaagctccaagcaggtcaggagccgaaatcttgaaatcacaattaggaccagtgctttgagcgcgagagttgcggtacaccggattgcagcactgaaacaccatcagcgacggatgtctcacgcttgccagcacggtgggatctgcaatcatgcccacatccagatcttcagcattggcaatgctgaacggggtcatcttgcaggtctgcctacccatggcgggcacccaattaggcttgtggttgcaatcgcagtgcagggggatcagtatcatcttggcctgatcctgtctgattcctggatacacggctctcatgaaagcatcatattgcttgaaagcctgctgggctttactaccctcggtataaaacatcccgcaggacctgctcgaaaactggttagctgcacagccggcatcattcacacagcagcgggcgtcattgttagctatttgcaccacacttctgccccagcggttttgggtgattttggttcgctcgggattctcctttaaggctcgttgtccgttctcgctggccacatccatctcgataatctgctccttctgaatcataatattgccatgcaggcacttcagcttgccctcataatcattgcagccatgaggccacaacgcacagcctgtacattcccaattatggtgggcgatctgagaaaaagaatgtatcattccctgcagaaatcttcccatcatcgtgctcagtgtcttgtgactagtgaaagttaactggatgcctcggtgctcctcgtttacgtactggtgacagatgcgcttgtattgttcgtgttgctcaggcattagtttaaaagaggttctaagttcgttatccagcctgtacttctccatcagcagacacatcacttccatgcctttctcccaagcagacaccaggggcaagctaatcggattcttaacagtgcaggcagcagctcctttagccagagggtcatctttagcgatcttctcaatgcttcttttgccatccttctcaacgatgcgcacgggcgggtagctgaaacccactgctacaagttgcgcctcttctctttcttcttcgctgtcttgactgatgtcttgcatggggatatgtttggtcttccttggcttctttttggggggtatcggaggaggaggactgtcgctccgttccggagacagggaggattgtgacgtttcgctcaccattaccaactgactgtcggtagaagaacctgaccccacacggcgacaggtgtttctcttcgggggcagaggtggaggcgattgcgaagggctgcggtccgacctggaaggcggatgactggcagaaccccttccgcgttcgggggtgtgctccctgtggcggtcgcttaactgatttccttcgcggctggccattgtgttctcctaggcagagaaacaacagacatggaaactcagccattgctgtcaacatcgccacgagtgccatcacatctcgtcctcagcgacgaggaaaaggagcagagcttaagcattccaccgcccagtcctgccaccacctctaccctagaagataaggaggtcgacgcatctcatgacatgcagaataaaaaagcgaaagagtctgagacagacatcgagcaagacccgggctatgtgacaccggtggaacacgaggaagagttgaaacgctttctagagagagaggatgaaaactgcccaaaacaacgagcagataactatcaccaagatgctggaaatagggatcagaacaccgactacctcatagggcttgacggggaagacgcgctccttaaacatctagcaagacagtcgctcatagtcaaggatgcattattggacagaactgaagtgcccatcagtgtggaagagctcagccgcgcctacgagcttaacctcttttcacctcgtactccccccaaacgtcagccaaacggcacctgcgagccaaatcctcgcttaaacttttatccagcttttgctgtgccagaagtactggctacctatcacatcttttttaaaaatcaaaaaattccagtctcctgccgcgctaatcgcacccgcgccgatgccctactcaatctgggacctggttcacgcttacctgatatagcttccttggaagaggttccaaagatcttcgagggtctgggcaataatgagactcgggccgcaaatgctctgcaaaagggagaaaatggcatggatgagcatcacagcgttctggtggaattggaaggcgataatgccagactcgcagtactcaagcgaagcatcgaggtcacacacttcgcatatcccgctgtcaacctgccccctaaagtcatgacggcggtcatggaccagttactcattaagcgcgcaagtcccctttcagaagacatgcatgacccagatgcctgtgatgagggtaaaccagtggtcagtgatgagcagctaacccgatggctgggcaccgactctcccagggatttggaagagcgtcgcaagcttatgatggccgtggtgctggttaccgtagaactagagtgtctccgacgtttctttaccgattcagaaaccttgcgcaaactcgaagagaatctgcactacacttttagacacggctttgtgcggcaggcatgcaagatatctaacgtggaactcaccaacctggtttcctacatgggtattctgcatgagaatcgcctaggacaaagcgtgctgcacagcaccctgaagggggaagcccgccgtgattacatccgcgattgtgtctatctgtacctgtgccacacgtggcaaaccggcatgggtgtatggcagcaatgtttagaagaacagaacttgaaagagcttgacaagctcttacagaaatctcttaaggttctgtggacagggttcgacgagcgcaccgtcgcttccgacctggcagacctcatcttcccagagcgtctcagggttactttgcgaaacggattgcctgactttatgagccagagcatgcttaacaattttcgctctttcatcctggaacgctccggtatcctgcccgccacctgctgcgcactgccctccgactttgtgcctctcacctaccgcgagtgccccccgccgctatggagtcactgctacctgttccgtctggccaactatctctcctaccactcggatgtgatcgaggatgtgagcggagacggcttgctggagtgtcactgccgctgcaatctgtgcacgccccaccggtccctagcttgcaacccccagttgatgagcgaaacccagataataggcacctttgaattgcaaggccccagcagccaaggcgatgggtcttctcctgggcaaagtttaaaactgaccccgggactgtggacctccgcctacttgcgcaagtttgctccggaagattaccacccctatgaaatcaagttctatgaggaccaatcacagcctccaaaggccgaactttcggcctgcgtcatcacccagggggcaattctggcccaattgcaagccatccaaaaatcccgccaagaatttctactgaaaaagggtaagggggtctaccttgacccccagaccggcgaggaactcaacacaaggttccctcaggatgtcccaacgacgagaaaacaagaagttgaaggtgcagccgccgcccccagaagatatggaggaagattgggacagtcaggcagaggaggcggaggaggacagtctggaggacagtctggaggaagacagtttggaggaggaaaacgaggaggcagaggaggtggaagaagtaaccgccgacaaacagttatcctcggctgcggagacaagcaacagcgctaccatctccgctccgagtcgaggaacccggcggcgtcccagcagtagatgggacgagaccggacgcttcccgaacccaaccagcgcttccaagaccggtaagaaggatcggcagggatacaagtcctggcgggggcataagaatgccatcatctcctgcttgcatgagtgcgggggcaacatatccttcacgcggcgctacttgctattccaccatggggtgaactttccgcgcaatgttttgcattactaccgtcacctccacagcccctactatagccagcaaatcccggcagtctcgacagataaagacagcggcggcgacctccaacagaaaaccagcagcggcagttagaaaatacacaacaagtgcagcaacaggaggattaaagattacagccaacgagccagcgcaaacccgagagttaagaaatcggatctttccaaccctgtatgccatcttccagcagagtcggggtcaagagcaggaactgaaaataaaaaaccgatctctgcgttcgctcaccagaagttgtttgtatcacaagagcgaagatcaacttcagcgcactctcgaggacgccgaggctctcttcaacaagtactgcgcgctgactcttaaagagtaggcagcgaccgcgcttattcaaaaaaggcgggaattacatcatcctcgacatgagtaaagaaattcccacgccttacatgtggagttatcaaccccaaatgggattggcggcaggcgcctcccaggactactccacccgcatgaattggctcagcgccgggccttctatgatttctcgagttaatgatatacgcgcctaccgaaaccaaatacttttggaacagtcagctcttaccaccacgccccgccaacaccttaatcccagaaattggcccgccgccctagtgtaccaggaaagtcccgctcccaccactgtattacttcctcgagacgcccaggccgaagtccaaatgactaatgcaggtgcgcagttagctggcggctccaccctatgtcgtcacaggcctcggcataatataaaacgcctgatgatcagaggccgaggtatccagctcaacgacgagtcggtgagctctccgcttggtctacgaccagacggaatctttcagattgccggctgcgggagatcttccttcacccctcgtcaggctgttctgactttggaaagttcgtcttcgcaaccccgctcgggcggaatcgggaccgttcaatttgtggaggagtttactccctctgtctacttcaaccccttctccggatctcctgggcattacccggacgagttcataccgaacttcgacgcgattagcgagtcagtggacggctacgattgatgtctggtgacgcggctgagctatctcggctgcgacatctagaccactgccgccgctttcgctgctttgcccgggaactcattgagttcatctacttcgaactccccaaggatcaccctcaaggtccggcccacggagtgcggatttctatcgaaggcaaaatagactctcgcctgcaacgaattttctcccagcggcccgtgctgatcgagcgagaccagggaaacaccacggtttccatctactgcatttgtaatcaccccggattgcatgaaagcctttgctgtcttatgtgtactgagtttaataaaaactgaattaagactctcctacggactgccgcttcttcaacccggattttacaaccagaagaacgaaacttttcctgtcgtccaggactctgttaacttcacctttcctactcacaaactagaagctcaacgactacaccgcttttccagaagcattttccctactaatactactttcaaaaccggaggtgagctccaaggtcttcctacagaaaacccttgggtggaagcgggccttgtagtgctaggaattcttgcgggtgggcttgtgattattctttgctacctatacacaccttgcttcactttcttagtggtgttgtggtattggtttaaaaaatggggcccatactagtcttgcttgttttactttcgcttttggaaccgggttctgccaattacgatccatgtctagacttcgacccagaaaactgcacacttacttttgcacccgacacaagccgcatctgtggagttcatcgcctctcttacgaacttggcccccaacgacaaaaatttacctgcatggtgggaatcaaccccatagttatcacccagcaaagtggagatactaagggttgcattcactgctcctgcgattccatcgagtgcacctacaccctgctgaagaccctatgcggcctaagagacctgctaccaatgaattaaaaaatgattaataaaaaatcacttacttgaaatcagcaataaggtctctgttgaaattttctcccagcagcacctcacttccctcttcccaactctggtattctaaaccccgttcagcggcatactttctccatactttaaaggggatgtcaaattttagctcctctcctgtacccacaatcttcatgtctttcttcccagatgaccaagagagtccggctcagtgactccttcaaccctgtctacccctatgaagatgaaagcacctcccaacacccctttataaacccagggtttatttccccaaatggcttcacacaaagcccaaacggagttcttactttaaaatgtttaaccccactaacaaccacaggcggatctctacagctaaaagtgggagggggacttacagtggatgacaccaacggttttttgaaagaaaacataagtgccaccacaccactcgttaagactggtcactctataggtttaccactaggagccggattgggaacgaatgaaaataaactttgtatcaaattaggacaaggacttacattcaattcaaacaacatttgcattgatgacaatattaacaccttatggacaggagtcaaccccaccgaagccaactgtcaaatcatgaactccagtgaatctaatgattgcaaattaattctaacactagttaaaactggagcactagtcactgcatttgtttatgttataggagtatctaacaattttaatatgctaactacacacagaaatataaattttactgcagagctgtttttcgattctactggtaatttactaactagactctcatccctcaaaactccacttaatcataaatcaggacaaaacatggctactggtgccattactaatgctaaaggtttcatgcccagcacgactgcctatcctttcaatgataattctagagaaaaagaaaactacatttacggaacttgttactacacagctagtgatcgcactgcttttcccattgacatatctgtcatgcttaaccgaagagcaataaatgacgagacatcatattgtattcgtataacttggtcctggaacacaggagatgccccagaggtgcaaacctctgctacaaccctagtcacctccccatttaccttttactacatcagagaagacgactgacaaataaagtttgcgatcgccaggcccaccatggccccgcggcgggcgcgcggctgccggaccctcggtctcccggcgctgctactgctgctgctgctccggccgccggcgacgcggggcatcacgtgccctccccccatgtccgtggaacacgcagacatctgggtcaagagctacagcttgtactccagggagcggtacatttgtaactctggtttcaagcgtaaagccggcacgtccagcctgacggagtgcgtgttgaacaaggccacgaatgtcgcccactggacaacccccagtctcaaatgcattagagacggaggcggcggttcagctgtgggccaggacacgcaggaggtcatcgtggtgccacactccttgccctttaaggtggtggtgatctcagccatcctggccctggtggtgctcaccatcatctcccttatcatcctcatcatgctttggcagaagaagccacgtggaagcggagctactaacttcagcctgctgaagcaggctggagacgtggaggagaaccctggacctgactggacctggcgcatcctgttcttggtggcagctgctacgggagctcattccaactgggtgaatgtaataagtgatttgaaaaaaattgaagatcttattcaatctatgcatattgatgctactttatatacggaaagtgatgttcaccccagttgcaaagtaacagcaatgaagtgctttctcttggagttacaagttatttcacttgagtccggagatgcaagtattcatgatacagtagaaaatctgatcatcctagcaaacaacagtttgtcttctaatgggaatgtaacagaatctggatgcaaagaatgtgaggaactggaggaaaaaaatattaaagaatttttgcagagttttgtacatattgtccaaatgttcatcaacacttcttaagctagcttgactgactgagatacagcgtaccttcagctcacagacatgataagatacattgatgagtttggacaaaccacaactagaatgcagtgaaaaaaatgctttatttgtgaaatttgtgatgctattgctttatttgtaaccattataagctgcaataaacaagttaacaacaacaattgcattcattttatgtttcaggttcagggggaggtgtgggaggttttttaaagcaagtaaaacctctacaaatgtggtagtcgtcagctatcctgcaggaacttgtttatttgaaaatcaattcacaaaatccgagtagttattttgcctcccccttcccatttaacagaatacaccaatctctccccacgcacagctttaaacatttggataccattagatatagacatggttttagattccacattccaaacagtttcagagcgagccaatctggggtcagtgatagataaaaatccatcgggatagtcttttaaagcgctttcacagtccaactgctgcggatgcgactccggagtctggatcacggtcatctggaagaagaacgatgggaatcataatccgaaaacggtatcggacgattgtgtctcatcaaacccacaagcagccgctgtctgcgtcgctccgtgcgactgctgtttatgggatcagggtccacagtgtcctgaagcatgattttaatagcccttaacatcaactttctggtgcgatgcgcgcagcaacgcattctgatttcactcaaatctttgcagtaggtacaacacattattacaatattgtttaataaaccataattaaaagcgctccagccaaaactcatatctgatataatcgcccctgcatgaccatcataccaaagtttaatataaattaaatgacgttccctcaaaaacacactacccacatacatgatctcttttggcatgtgcatattaacaatctgtctgtaccatggacaacgttggttaatcatgcaacccaatataaccttccggaaccacactgccaacaccgctcccccagccatgcattgaagtgaaccctgctgattacaatgacaatgaagaacccaattctctcgaccgtgaatcacttgagaatgaaaaatatctatagtggcacaacatagacataaatgcatgcatcttctcataatttttaactcctcaggatttagaaacatatcccagggaataggaagctcttgcagaacagtaaagctggcagaacaaggaagaccacgaacacaacttacactatgcatagtcatagtatcacaatctggcaacagcgggtggtcttcagtcatagaagctcgggtttcattttcctcacaacgtggtaactgggctctggtgtaagggtgatgtctggcgcatgatgtcgagcgtgcgcgcaaccttgtcataatggagttgcttcctgacattctcgtattttgtatagcaaaacgcggccctggcagaacacactcttcttcgccttctatcctgccgcttagcgtgttccgtgtgatagttcaagtacaaccacactcttaagttggtcaaaagaatgctggcttcagttgtaatcaaaactccatcgcatctaatcgttctgaggaaatcatccaagcaatgcaactggattgtgtttcaagcaggagaggagagggaagagacggaagaaccatgttaatttttattccaaacgatctcgcagtacttcaaattgtagatcgcgcagatggcatctctcgcccccactgtgttggtgaaaaagcacagctagatcaaaagaaatgcgattttcaaggtgctcaacggtggcttccagcaaagcctccacgcgcacatccaagaacaaaagaataccaaaagaaggagcattttctaactcctcaatcatcatattacattcctgcaccattcccagataattttcagctttccagccttgaattattcgtgtcagttcttgtggtaaatccaatccacacattacaaacaggtcccggagggcgccctccaccaccattcttaaacacaccctcataatgacaaaatatcttgctcctgtgtcacctgtagcgaattgagaatggcaacatcaattgacatgcccttggctctaagttcttctttaagttctagttgtaaaaactctctcatattatcaccaaactgcttagccagaagccccccgggaacaagagcaggggacgctacagtgcagtacaagcgcagacctccccaattggctccagcaaaaacaagattggaataagcatattgggaaccgccagtaatatcatcgaagttgctggaaatataatcaggcagagtttcttgtaaaaattgaataaaagaaaaatttgccaaaaaaacattcaaaacctctgggatgcaaatgcaataggttaccgcgctgcgctccaacattgttagttttgaattagtctgcaaaaataaaaaaaaaaacaagcgtcatatcatagtagcctgacgaacagatggataaatcagtctttccatcacaagacaagccacagggtctccagctcgaccctcgtaaaacctgtcatcatgattaaacaacagcaccgaaagttcctcgcggtgaccagcatgaataattcttgatgaagcatacaatccagacatgttagcatcagttaacgagaaaaaacagccaacatagcctttgggtataattatgcttaatcgtaagtatagcaaagccacccctcgcggatacaaagtaaaaggcacaggagaataaaaaatataattatttctctgctgctgttcaggcaacgtcgcccccggtccctctaaatacacatacaaagcctcatcagccatggcttaccagacaaagtacagcgggcacacaaagcacaagctctaaagtgactctccaacctctccacaatatatatatacacaagccctaaactgacgtaatgggagtaaagtgtaaaaaatcccgccaaacccaacacacaccccgaaactgcgtcaccagggaaaagtacagtttcacttccgcaatcccaacaggcgtaacttcctctttctcacggtacgtgatatcccactaacttgcaacgtcattttcccacggtcgcaccgccccttttagccgttaaccccacagccaatcaccacacgatccacactttttaaaatcacctcatttacatattggcaccattccatctataaggtatattatatagataga

SEQ ID NO: 91 - DNA, 33079 bp, Artificial Sequence
  Genome sequence of NG-744 virus
tctatctatataatataccttatagatggaatggtgccaatatgtaaatgaggtgattttaaaaagtgtggatcgtgtggtgattggctgtggggttaacggctaaaaggggcggtgcgaccgtgggaaaatgacgttttgtgggggtggagtttttttgcaagttgtcgcgggaaatgtgacgcataaaaaggcttttttctcacggaactacttagttttcccacggtatttaacaggaaatgaggtagttttgaccggatgcaagtgaaaattgttgattttcgcgcgaaaactgaatgaggaagtgtttttctgaataatgtggtatttatggcagggtggagtatttgttcagggccaggtagactttgacccattacgtggaggtttcgattaccgtgttttttacctgaatttccgcgtaccgtgtcaaagtcttctgtttttacgtaggtgtcagctgatcgctagggtatttatacctcagggtttgtgtcaagaggccactcttgagtgccagcgagaagagttttctcctctgcgccggcagtttaataataaaaaaatgagagatttgcgatttctgcctcaggaaataatctctgctgagactggaaatgaaatattggagcttgtggtgcacgccctgatgggagacgatccggagccacctgtgcagctttttgagcctcctacgcttcaggaactgtatgatttagaggtagagggatcggaggattctaatgaggaagctgtaaatggcttttttaccgattctatgcttttagctgctaatgaagggttagaattagatccgcctttggacacttttgatactccaggggtaattgtggaaagcggtacaggtgtaagaaaattacctgatttgagttccgtggactgtgatttgcactgctatgaagacgggtttcctccgagtgatgaggaggaccatgaaaaggagcagtccatgcagactgcagcgggtgagggagtgaaggctgccaatgttggttttcagttggattgcccggagcttcctggacatggctgtaagtcttgtgaatttcacaggaaaaatactggagtaaaggaactgttatgttcgctttgttatatgagaacgcactgccactttatttacagtaagtgtgtttaagttaaaatttaaaggaatatgctgtttttcacatgtatattgagtgtgagttttgtgcttcttattataggtcctgtgtctgatgctgatgaatcaccatctcctgattctactacctcacctcctgagattcaagcacctgttcctgtggacgtgcgcaagcccattcctgtgaagcttaagcctgggaaacgtccagcagtggaaaaacttgaggacttgttacagggtggggacggacctttggacttgagtacacggaaacgtccaagacaataagtgttccatatccgtgtttacttaaggtgacgtcaatatttgtgtgacagtgcaatgtaataaaaatatgttaactgttcactggtttttattgctttttgggcggggactcaggtatataagtagaagcagacctgtgtggttagctcataggagctggctttcatccatggaggtttgggccattttggaagaccttaggaagactaggcaactgttagagaacgcttcggacggagtctccggtttttggagattctggttcgctagtgaattagctagggtagtttttaggataaaacaggactataaacaagaatttgaaaagttgttggtagattgcccaggactttttgaagctcttaatttgggccatcaggttcactttaaagaaaaagttttatcagttttagacttttcaaccccaggtagaactgctgctgctgtggcttttcttacttttatattagataaatggatcccgcagactcatttcagcaggggatacgttttggatttcatagccacagcattgtggagaacatggaaggttcgcaagatgaggacaatcttaggttactggccagtgcagcctttgggtgtagcgggaatcctgaggcatccaccggtcatgccagcggttctggaggaggaacagcaagaggacaacccgagagccggcctggaccctccagtggaggaggcggagtagctgacttgtctcctgaactgcaacgggtgcttactggatctacgtccactggacgggataggggcgttaagagggagagggcatctagtggtactgatgctagatctgagttggctttaagtttaatgagtcgcagacgtcctgaaaccatttggtggcatgaggttcagaaagagggaagggatgaagtttctgtattgcaggagaaatattcactggaacaggtgaaaacatgttggttggagcctgaggatgattgggaggtggccattaaaaattatgccaagatagctttgaggcctgataaacagtataagattactagacggattaatatccggaatgcttgttacatatctggaaatggggctgaggtggtaatagatactcaagacaaggcagttattagatgctgcatgatggatatgtggcctggggtagtcggtatggaagcagtaacttttgtaaatgttaagtttaggggagatggttataatggaatagtgtttatggccaataccaaacttatattgcatggttgtagcttttttggtttcaacaatacctgtgtagatgcctggggacaggttagtgtacggggatgtagtttctatgcgtgttggattgccacagctggcagaaccaagagtcaattgtctctgaagaaatgcatatttcaaagatgtaacctgggcattctgaatgaaggcgaagcaagggtccgccactgcgcttctacagatactggatgttttattttgattaagggaaatgccagcgtaaagcataacatgatttgcggtgcttccgatgagaggccttatcaaatgctcacttgtgctggtgggcattgtaatatgctggctactgtgcatattgtttcccatcaacgcaaaaaatggcctgtttttgatcacaatgtgatgacgaagtgtaccatgcatgcaggtgggcgtagaggaatgtttatgccttaccagtgtaacatgaatcatgtgaaagtgttgttggaaccagatgccttttccagaatgagcctaacaggaatttttgacatgaacatgcaaatctggaagatcctgaggtatgatgatacgagatcgagggtacgcgcatgcgaatgcggaggcaagcatgccaggttccagccggtgtgtgtagatgtgactgaagatctcagaccggatcatttggttattgcccgcactggagcagagttcggatccagtggagaagaaactgactaaggtgagtattgggaaaactttggggtgggattttcagatggacagattgagtaaaaatttgttttttctgtcttgcagctgtcatgagtggaaacgcttcttttaaggggggagtcttcagcccttatctgacagggcgtctcccatcctgggcaggagttcgtcagaatgttatgggatctactgtggatggaagacccgtccaacccgccaattcttcaacgctgacctatgctactttaagttcttcacctttggacgcagctgcagctgccgccgccgcttctgttgccgctaacactgtgcttggaatgggttactatggaagcatcatggctaattccacttcctctaataacccttctaccctgactcaggacaagttacttgtccttttggcccagctggaggctttgacccaacgtctgggtgaactttctcagcaggtggtcgagttgcgagtacaaactgagtctgctgtcggcacggcaaagtctaaataaaaaaatcccagaatcaatgaataaataaacaagcttgttgttgatttaaaatcaagtgtttttatttcatttttcgcgcacggtatgccctagaccaccgatctctatcattgagaactcggtggattttttccaggatcctatagaggtgggattgaatgtttagatacatgggcattaggccgtctttggggtggagatagctccattgaagggattcatgctccggggtagtgttgtaaatcacccagtcataacaaggtcgcagtgcatggtgttgcacaatatcttttagaagtaggctgattgccacagataagcccttggtgtaggtgtttacaaaccggttgagctgggatgggtgcattcggggtgaaattatgtgcattttggattggatttttaagttggcaatattgccgccaagatcccgtcttgggttcatgttatgaaggaccaccaagacggtgtatccggtacatttaggaaatttatcgtgcagcttggatggaaaagcgtggaaaaatttggagacacccttgtgtcctccaagattttccatgcactcatccatgataatagcaatggggccgtgggcagcggcgcgggcaaacacgttccgtgggtctgacacatcatagttatgttcctgagttaaatcatcataagccattttaatgaatttggggcggagagtaccagattggggtatgaatgttccttcgggccccggagcatagttcccctcacagatttgcatttcccaagctttcagttccgagggtggaatcatgtccacctggggggctatgaaaaacaccgtttctggggcgggggtgattaattgtgatgatagcaaatttctgagcaattgagatttgccacatccggtggggccataaatgattccgattacgggttgcaggtggtagtttagggaacggcaactgccgtcttctcgaagcaagggggccacctcgttcatcatttcccttacatgcatattttcccgcaccaaatccattaggaggcgctctcctcctagtgatagaagttcttgtagtgaggaaaagtttttcagcggtttcagaccgtcagccatgggcattttggagagagtttgctgcaaaagttctagtctgttccacagttcagtgatgtgttctatggcatctcgatccagcagacctcctcgtttcgcgggtttggacggctcctggaatagggtatgagacgatgggcgtccagcgctgccagggttcggtccttccagggtctcagtgttcgagtcagggttgtttccgtcacagtgaaggggtgtgcgcctgcttgggcgcttgccagggtgcgcttcagactcatcctgctggtcgaaaacttctgtcgcttggcgccctgtatgtcggccaagtagcagtttaccatgagttcgtagttgagcgcctcggctgcgtggcctttggcgcggagcttacctttggaagttttcttgcataccgggcagtataggcatttcagcgcatacaacttgggcgcaaggaaaacggattctggggagtatgcatctgcgccgcaggaggcgcaaacagtttcacattccaccagccaggttaaatccggttcattggggtcaaaaacaagttttccgccatattttttgatgcgtttcttacctttggtctccatgagttcgtgtcctcgttgagtgacaaacaggctgtccgtgtccccgtagactgattttacaggcctcttctccagtggagtgcctcggtcttcttcgtacaggaactctgaccactctgatacaaaggcgcgcgtccaggccagcacaaaggaggctatgtgggaggggtagcgatcgttgtcaaccagggggtccaccttttccaaagtatgcaaacacatgtcaccctcttcaacatccaggaatgtgattggcttgtaggtgtatttcacgtgacctggggtccccgctgggggggtataaaagggggcggttctttgctcttcctcactgtcttccggatcgctgtccaggaacgtcagctgttggggtaggtattccctctcgaaggcgggcatgacctctgcactcaggttgtcagtttctaagaacgaggaggatttgatattgacagtgccggttgagatgcctttcatgaggttttcgtccatctggtcagaaaacacaatttttttattgtcaagtttggtggcaaatgatccatacagggcgttggataaaagtttggcaatggatcgcatggtttggttcttttccttgtccgcgcgctctttggcggcgatgttgagttggacatactcgcgtgccaggcacttccattcggggaagatagttgttaattcatctggcacgattctcacttgccaccctcgattatgcaaggtaattaaatccacactggtggccacctcgcctcgaaggggttcattggtccaacagagcctacctcctttcctagaacagaaagggggaagtgggtctagcataagttcatcgggagggtctgcatccatggtaaagattcccggaagtaaatccttatcaaaatagctgatgggagtggggtcatctaaggccatttgccattctcgagctgccagtgcgcgctcatatgggttaaggggactgccccatggcatgggatgggtgagtgcagaggcatacatgccacagatgtcatagacgtagatgggatcctcaaagatgcctatgtaggttggatagcatcgcccccctctgatacttgctcgcacatagtcatatagttcatgtgatggcgctagcagccccggacccaagttggtgcgattgggtttttctgttctgtagacgatctggcgaaagatggcgtgagaattggaagagatggtgggtctttgaaaaatgttgaaatgggcatgaggtagacctacagagtctctgacaaagtgggcataagattcttgaagcttggttaccagttcggcggtgacaagtacgtctagggcgcagtagtcaagtgtttcttgaatgatgtcataacctggttggtttttcttttcccacagttcgcggttgagaaggtattcttcgcgatccttccagtactcttctagcggaaacccgtctttgtctgcacggtaagatcctagcatgtagaactgattaactgccttgtaagggcagcagcccttctctacgggtagagagtatgcttgagcagcttttcgtagcgaagcgtgagtaagggcaaaggtgtctctgaccatgactttgaggaattggtatttgaagtcgatgtcgtcacaggctccctgttcccagagttggaagtctacccgtttcttgtaggcggggttgggcaaagcgaaagtaacatcattgaagagaatcttgccggccctgggcatgaaattgcgagtgatgcgaaaaggctgtggtacttccgctcggttattgataacctgggcagctaggacgatctcgtcgaaaccgttgatgttgtgtcctacgatgtataattctatgaaacgcggcgtgcctctgacgtgaggtagcttactgagctcatcaaaggttaggtctgtggggtcagataaggcgtagtgttcgagagcccattcgtgcaggtgaggattcgctttaaggaaggaggaccagaggtccactgccagtgctgtttgtaactggtcccggtactgacgaaaatgccgtccgactgccattttttctggggtgacgcaatagaaggtttgggggtcctgccgccagcgatcccacttgagttttatggcgaggtcataggcgatgttgacgagccgctggtctccagagagtttcatgaccagcatgaaggggattagctgcttgccaaaggaccccatccaggtgtaggtttccacatcgtaggtgagaaagagcctttctgtgcgaggatgagagccaatcgggaagaactggatctcctgccaccagttggaggaatggctgttgatgtgatggaagtagaactccctgcgacgcgccgagcattcatgcttgtgcttgtacagacggccgcagtagtcgcagcgttgcacgggttgtatctcgtgaatgagttgtacctggcttcccttgacgagaaatttcagtgggaagccgaggcctggcgattgtatctcgtgctttactatgttgtctgcatcggcctgttcatcttctgtctcgatggtggtcatgctgacgagccctcgcgggaggcaagtccagacctcggcgcggcaggggcggagctcgaggacgagagcgcgcaggctggagctgtccagggtcctgagacgctgcggactcaggttagtaggcagtgtcaggagattaacttgcatgatcttttggagggcgtgcgggaggttcagatagtacttgatctcaacgggtccgttggtggagatgtcgatggcttgcagggttccgtgtcccttgggcgctaccaccgtgcccttgtttttcattttggacggcggtggctctgttgcttcttgcatgtttagaagcggtgtcgagggcgcgcaccgggcggcaggggcggctcgggacccggcggcatggctggcagtggtacgtcggcgccgcgcgcgggtaggttctggtactgcgccctgagaagactcgcatgcgcgacgacgcggcggttgacatcctggatctgacgcctctgggtgaaagctaccggccccgtgagcttgaacctgaaagagagttcaacagaatcaatctcggtatcgttgacggcggcttgcctaaggatttcttgcacgtcaccagagttgtcctggtaggcgatctccgccatgaactgctcgatctcttcctcttgaagatctccgcggcccgctctctcgacggtggccgcgaggtcgttggagatgcgcccaatgagttgagagaatgcattcatgcccgcctcgttccagacgcggctgtagaccacggcccccacgggatctctcgcgcgcatgaccacctgggcgaggttgagctccacgtggcgggtgaagaccgcatagttgcataggcgctggaaaaggtagttgagtgtggtggcgatgtgctcggtgacgaagaaatacatgatccatcgtctcagcggcatctcgctgacatcgcccagagcttccaagcgctccatggcctcgtagaagtccacggcaaaattaaaaaactgggagtttcgcgcggacacggtcaactcctcttccagaagacggataagttcggcgatggtggtgcgcacctcgcgctcgaaagcccctgggatttcttcctcaatctcttcttcttccactaacatctcttcctcttcaggtggggctgcaggaggagggggaacgcggcgacgccggcggcgcacgggcagacggtcgatgaatctttcaatgacctctccgcggcggcggcgcatggtttcagtgacggcgcggccgttctcgcgcggtcgcagagtaaaaacaccgccgcgcatctccttaaagtggtgactgggaggttctccgtttgggagggagagggcgctgattatacattttattaattggcccgtagggactgcacgcagagatctgatcgtgtcaagatccacgggatctgaaaacctttcgacgaaagcgtctaaccagtcacagtcacaaggtaggctgagtacggcttcttgtgggcgggggtggttatgtgttcggtctgggtcttctgtttcttcttcatctcgggaaggtgagacgatgctgctggtgatgaaattaaagtaggcagttctaagacggcggatggtggcgaggagcaccaggtctttgggtccggcttgctggatacgcaggcgattggccattccccaagcattatcctgacatctagcaagatctttgtagtagtcttgcatgagccgttctacgggcacttcttcctcacccgttctgccatgcatacgtgtgagtccaaatccgcgcattggttgtaccagtgccaagtcagctacgactctttcggcgaggatggcttgctgtacttgggtaagggtggcttgaaagtcatcaaaatccacaaagcggtggtaagctcctgtattaatggtgtaagcacagttggccatgactgaccagttaactgtctggtgaccagggcgcacgagctcggtgtatttaaggcgcgaataggcgcgggtgtcaaagatgtaatcgttgcaggtgcgcaccagatactggtaccctataagaaaatgcggcggtggttggcggtagagaggccatcgttctgtagctggagcgccaggggcgaggtcttccaacataaggcggtgatagccgtagatgtacctggacatccaggtgattcctgcggcggtagtagaagcccgaggaaactcgcgtacgcggttccaaatgttgcgtagcggcatgaagtagttcattgtaggcacggtttgaccagtgaggcgcgcgcagtcattgatgctctatagacacggagaaaatgaaagcgttcagcgactcgactccgtagcctggaggaacgtgaacgggttgggtcgcggtgtaccccggttcgagacttgtactcgagccggccggagccgcggctaacgtggtattggcactcccgtctcgacccagcctacaaaaatccaggatacggaatcgagtcgttttgctggtttccgaatggcagggaagtgagtcctattttttttttttgccgctcagatgcatcccgtgctgcgacagatgcgcccccaacaacagcccccctcgcagcagcagcagcagcaatcacaaaaggctgtccctgcaactactgcaactgccgccgtgagcggtgcgggacagcccgcctatgatctggacttggaagagggcgaaggactggcacgtctaggtgcgccttcacccgagcggcatccgcgagttcaactgaaaaaagattctcgcgaggcgtatgtgccccaacagaacctatttagagacagaagcggcgaggagccggaggagatgcgagcttcccgctttaacgcgggtcgtgagctgcgtcacggtttggaccgaagacgagtgttgcgggacgaggatttcgaagttgatgaaatgacagggatcagtcctgccagggcacacgtggctgcagccaaccttgtatcggcttacgagcagacagtaaaggaagagcgtaacttccaaaagtcttttaataatcatgtgcgaaccctgattgcccgcgaagaagttacccttggtttgatgcatttgtgggatttgatggaagctatcattcagaaccctactagcaaacctctgaccgcccagctgtttctggtggtgcaacacagcagagacaatgaggctttcagagaggcgctgctgaacatcaccgaacccgaggggagatggttgtatgatcttatcaacattctacagagtatcatagtgcaggagcggagcctgggcctggccgagaaggtggctgccatcaattactcggttttgagcttgggaaaatattacgctcgcaaaatctacaagactccatacgttcccatagacaaggaggtgaagatagatgggttctacatgcgcatgacgctcaaggtcttgaccctgagcgatgatcttggggtgtatcgcaatgacagaatgcatcgcgcggttagcgccagcaggaggcgcgagttaagcgacagggaactgatgcacagtttgcaaagagctctgactggagctggaaccgagggtgagaattacttcgacatgggagctgacttgcagtggcagcctagtcgcagggctctgagcgccgcgacggcaggatgtgagcttccttacatagaagaggcggatgaaggcgaggaggaagagggcgagtacttggaagactgatggcacaacccgtgttttttgctagatggaacagcaagcaccggatcccgcaatgcgggcggcgctgcagagccagccgtccggcattaactcctcggacgattggacccaggccatgcaacgtatcatggcgttgacgactcgcaaccccgaagcctttagacagcaaccccaggccaaccgtctatcggccatcatggaagctgtagtgccttcccgctctaatcccactcatgagaaggtcctggccatcgtgaacgcgttggtggagaacaaagctattcgtccagatgaggccggactggtatacaacgctctcttagaacgcgtggctcgctacaacagtagcaatgtgcaaaccaatttggaccgtatgataacagatgtacgcgaagccgtgtctcagcgcgaaaggttccagcgtgatgccaacctgggttcgctggtggcgttaaatgctttcttgagtactcagcctgctaatgtgccgcgtggtcaacaggattatactaactttttaagtgctttgagactgatggtatcagaagtacctcagagcgaagtgtatcagtccggtcctgattacttctttcagactagcagacagggcttgcagacggtaaatctgagccaagcttttaaaaaccttaaaggtttgtggggagtgcatgccccggtaggagaaagagcaaccgtgtctagcttgttaactccgaactcccgcctattattactgttggtagctcctttcaccgacagcggtagcatcgaccgtaattcctatttgggttacctactaaacctgtatcgcgaagccatagggcaaagtcaggtggacgagcagacctatcaagaaattacccaagtcagtcgcgctttgggacaggaagacactggcagtttggaagccactctgaacttcttgcttaccaatcggtctcaaaagatccctcctcaatatgctcttactgcggaggaggagaggatccttagatatgtgcagcagagcgtgggattgtttctgatgcaagagggggcaactccgactgcagcactggacatgacagcgcgaaatatggagcccagcatgtatgccagtaaccgacctttcattaacaaactgctggactacttgcacagagctgccgctatgaactctgattatttcaccaatgccatcttaaacccgcactggctgcccccacctggtttctacacgggcgaatatgacatgcccgaccctaatgacggatttctgtgggacgacgtggacagcgatgttttttcacctctttctgatcatcgcacgtggaaaaaggaaggcggcgatagaatgcattcttctgcatcgctgtccggggtcatgggtgctaccgcggctgagcccgagtctgcaagtccttttcctagtctacccttttctctacacagtgtacgtagcagcgaagtgggtagaataagtcgcccgagtttaatgggcgaagaggagtatctaaacgattccttgctcagaccggcaagagaaaaaaatttcccaaacaatggaatagaaagtttggtggataaaatgagtagatggaagacttatgctcaggatcacagagacgagcctgggatcatggggattacaagtagagcgagccgtagacgccagcgccatgacagacagaggggtcttgtgtgggacgatgaggattcggccgatgatagcagcgtgctggacttgggtgggagaggaaggggcaacccgtttgctcatttgcgccctcgcttgggtggtatgttgtaaaaaaaaataaaaaaaaaactcaccaaggccatggcgacgagcgtacgttcgttcttctttattatctgtgtctagtataatgaggcgagtcgtgctaggcggagcggtggtgtatccggagggtcctcctccttcgtacgagagcgtgatgcagcagcagcaggcgacggcggtgatgcaatccccactggaggctccctttgtgcctccgcgatacctggcacctacggagggcagaaacagcattcgttattcggaactggcacctcagtacgataccaccaggttgtatctggtggacaacaagtcggcggacattgcttctctgaactatcagaatgaccacagcaacttcttgaccacggtggtgcaaaacaatgactttacccctacggaagccagcacccagaccattaactttgatgaacgatcgcggtggggcggtcagctaaagaccatcatgcatactaacatgccaaacgtgaacgagtatatgtttagtaacaagttcaaagcgcgtgtgatggtgtccagaaaacctcccgacggtgctgcagttggggatacttatgatcacaagcaggatattttgaaatatgagtggttcgagtttactttgccagaaggcaacttttcagttactatgactattgatttgatgaacaatgccatcatagataattacttgaaagtgggtagacagaatggagtgcttgaaagtgacattggtgttaagttcgacaccaggaacttcaagctgggatgggatcccgaaaccaagttgatcatgcctggagtgtatacgtatgaagccttccatcctgacattgtcttactgcctggctgcggagtggattttaccgagagtcgtttgagcaaccttcttggtatcagaaaaaaacagccatttcaagagggttttaagattttgtatgaagatttagaaggtggtaatattccggccctcttggatgtagatgcctatgagaacagtaagaaagaacaaaaagccaaaatagaagctgctacagctgctgcagaagctaaggcaaacatagttgccagcgactctacaagggttgctaacgctggagaggtcagaggagacaattttgcgccaacacctgttccgactgcagaatcattattggccgatgtgtctgaaggaacggacgtgaaactcactattcaacctgtagaaaaagatagtaagaatagaagctataatgtgttggaagacaaaatcaacacagcctatcgcagttggtatctttcgtacaattatggcgatcccgaaaaaggagtgcgttcctggacattgctcaccacctcagatgtcacctgcggagcagagcaggtctactggtcgcttccagacatgatgaaggatcctgtcactttccgctccactagacaagtcagtaactaccctgtggtgggtgcagagcttatgcccgtcttctcaaagagcttctacaacgaacaagctgtgtactcccagcagctccgccagtccacctcgcttacgcacgtcttcaaccgctttcctgagaaccagattttaatccgtccgccggcgcccaccattaccaccgtcagtgaaaacgttcctgctctcacagatcacgggaccctgccgttgcgcagcagtatccggggagtccaacgtgtgaccgttactgacgccagacgccgcacctgtccctacgtgtacaaggcactgggcatagtcgcaccgcgcgtcctttcaagccgcactttctaaaaaaaaaaaaaatgtccattcttatctcgcccagtaataacaccggttggggtctgcgcgctccaagcaagatgtacggaggcgcacgcaaacgttctacccaacatcctgtccgtgttcgcggacattttcgcgctccatggggcgccctcaagggccgcactcgcgttcgaaccaccgtcgatgatgtaatcgatcaggtggttgccgacgcccgtaattatactcctactgcgcctacatctactgtggatgcagttattgacagtgtagtggctgacgctcgcaactatgctcgacgtaagagccggcgaaggcgcattgccagacgccaccgagctaccactgccatgcgagccgcaagagctctgctacgaagagctagacgcgtggggcgaagagccatgcttagggcggccagacgtgcagcttcgggcgccagcgccggcaggtcccgcaggcaagcagccgctgtcgcagcggcgactattgccgacatggcccaatcgcgaagaggcaatgtatactgggtgcgtgacgctgccaccggtcaacgtgtacccgtgcgcacccgtccccctcgcacttagaagatactgagcagtctccgatgttgtgtcccagcggcgaggatgtccaagcgcaaatacaaggaagaaatgctgcaggttatcgcacctgaagtctacggccaaccgttgaaggatgaaaaaaaaccccgcaaaatcaagcgggttaaaaaggacaaaaaagaagaggaagatggcgatgatgggctggcggagtttgtgcgcgagtttgccccacggcgacgcgtgcaatggcgtgggcgcaaagttcgacatgtgttgagacctggaacttcggtggtctttacacccggcgagcgttcaagcgctacttttaagcgttcctatgatgaggtgtacggggatgatgatattcttgagcaggcggctgaccgattaggcgagtttgcttatggcaagcgtagtagaataacttccaaggatgagacagtgtcgatacccttggatcatggaaatcccacccctagtcttaaaccggtcactttgcagcaagtgttacccgtaactccgcgaacaggtgttaaacgcgaaggtgaagatttgtatcccactatgcaactgatggtacccaaacgccagaagttggaggacgttttggagaaagtaaaagtggatccagatattcaacctgaggttaaagtgagacccattaagcaggtagcgcctggtctgggggtacaaactgtagacattaagattcccactgaaagtatggaagtgcaaactgaacccgcaaagcctactgccacctccactgaagtgcaaacggatccatggatgcccatgcctattacaactgacgccgccggtcccactcgaagatcccgacgaaagtacggtccagcaagtctgttgatgcccaattatgttgtacacccatctattattcctactcctggttaccgaggcactcgctactatcgcagccgaaacagtacctcccgccgtcgccgcaagacacctgcaaatcgcagtcgtcgccgtagacgcacaagcaaaccgactcccggcgccctggtgcggcaagtgtaccgcaatggtagtgcggaacctttgacactgccgcgtgcgcgttaccatccgagtatcatcacttaatcaatgttgccgctgcctccttgcagatatggccctcacttgtcgccttcgcgttcccatcactggttaccgaggaagaaactcgcgccgtagaagagggatgttgggacgcggaatgcgacgctacaggcgacggcgtgctatccgcaagcaattgcggggtggttttttaccagccttaattccaattatcgctgctgcaattggcgcgataccaggcatagcttccgtggcggttcaggcctcgcaacgacattgacattggaaaaaaacgtataaataaaaaaaaaaaaatacaatggactctgacactcctggtcctgtgactatgttttcttagagatggaagacatcaatttttcatccttggctccgcgacacggcacgaagccgtacatgggcacctggagcgacatcggcacgagccaactgaacgggggcgccttcaattggagcagtatctggagcgggcttaaaaattttggctcaaccataaaaacatacgggaacaaagcttggaacagcagtacaggacaggcgcttagaaataaacttaaagaccagaacttccaacaaaaagtagtcgatgggatagcttccggcatcaatggagtggtagatttggctaaccaggctgtgcagaaaaagataaacagtcgtttggacccgccgccagcaaccccaggtgaaatgcaagtggaggaagaaattcctccgccagaaaaacgaggcgacaagcgtccgcgtcccgatttggaagagacgctggtgacgcgcgtagatgaaccgccttcttatgaggaagcaacgaagcttggaatgcccaccactagaccgatagccccaatggccaccggggtgatgaaaccttctcagttgcatcgacccgtcaccttggatttgccccctccccctgctgctactgctgtacccgcttctaagcctgtcgctgccccgaaaccagtcgccgtagccaggtcacgtcccgggggcgctcctcgtccaaatgcgcactggcaaaatactctgaacagcatcgtgggtctaggcgtgcaaagtgtaaaacgccgtcgctgcttttaattaaatatggagtagcgcttaacttgcctatctgtgtatatgtgtcattacacgccgtcacagcagcagaggaaaaaaggaagaggtcgtgcgtcgacgctgagttactttcaagatggccaccccatcgatgctgccccaatgggcatacatgcacatcgccggacaggatgcttcggagtacctgagtccgggtctggtgcagttcgcccgcgccacagacacctacttcaatctgggaaataagtttagaaatcccaccgtagcgccgacccacgatgtgaccaccgaccgtagccagcggctcatgttgcgcttcgtgcccgttgaccgggaggacaatacatactcttacaaagtgcggtacaccctggccgtgggcgacaacagagtgctggatatggccagcacgttctttgacattaggggtgtgttggacagaggtcccagtttcaaaccctattctggtacggcttacaactccctggctcctaaaggcgctccaaatacatctcagtggattgcagaaggtgtaaaaaatacaactggtgaggaacacgtaacagaagaggaaaccaatactactacttacacttttggcaatgctcctgtaaaagctgaagctgaaattacaaaagaaggactcccagtaggtttggaagtttcagatgaagaaagtaaaccgatttatgctgataaaacatatcagccagaacctcagctgggagatgaaacttggactgaccttgatggaaaaaccgaaaagtatggaggcagggctctcaaacccgatactaagatgaaaccatgctacgggtcctttgccaaacctactaatgtgaaaggcggtcaggcaaaacaaaaaacaacggagcagccaaatcagaaagtcgaatatgatatcgacatggagttttttgatgcggcatcgcagaaaacaaacttaagtcctaaaattgtcatgtatgcagaaaatgtaaatttggaaactccagacactcatgtagtgtacaaacctggaacagaagacacaagttccgaagctaatttgggacaacaatctatgcccaacagacccaactacattggcttcagagataactttattggacttatgtactataacagtactggtaacatgggggtgctggctggtcaagcgtctcagttaaatgcagtggttgacttgcaggacagaaacacagaactttcttaccaactcttgcttgactctctgggcgacagaaccagatactttagcatgtggaatcaggctgtggacagttatgatcctgatgtacgtgttattgaaaatcatggtgtggaagatgaacttcccaactactgttttccactggacggcataggtgttccaacaaccagttacaaatcaatagttccaaatggagacaatgcgcctaattggaaggaacctgaagtaaatggaacaagtgagatcggacagggtaatttgtttgccatggaaattaaccttcaagccaatctatggcgaagtttcctttattccaatgtggctctatatctcccagactcgtacaaatacaccccgtccaatgtcactcttccagaaaacaaaaacacctacgactacatgaacgggcgggtggtgccgccatctctagtagacacctatgtgaacattggtgccaggtggtctctggatgccatggacaatgtcaacccattcaaccaccaccgtaacgctggcttgcgttaccgatccatgcttctgggtaacggacgttatgtgcctttccacatacaagtgcctcaaaaattcttcgctgttaaaaacctgctgcttctcccaggctcctacacttatgagtggaactttaggaaggatgtgaacatggttctacagagttccctcggtaacgacctgcgggtagatggcgccagcatcagtttcacgagcatcaacctctatgctacttttttccccatggctcacaacaccgcttccacccttgaagccatgctgcggaatgacaccaatgatcagtcattcaacgactacctatctgcagctaacatgctctaccccattcctgccaatgcaaccaatattcccatttccattccttctcgcaactgggcggctttcagaggctggtcatttaccagactgaaaaccaaagaaactccctctttggggtctggatttgacccctactttgtctattctggttctattccctacctggatggtaccttctacctgaaccacacttttaagaaggtttccatcatgtttgactcttcagtgagctggcctggaaatgacaggttactatctcctaacgaatttgaaataaagcgcactgtggatggcgaaggctacaacgtagcccaatgcaacatgaccaaagactggttcttggtacagatgctcgccaactacaacatcggctatcagggcttctacattccagaaggatacaaagatcgcatgtattcatttttcagaaacttccagcccatgagcaggcaggtggttgatgaggtcaattacaaagacttcaaggccgtcgccataccctaccaacacaacaactctggctttgtgggttacatggctccgaccatgcgccaaggtcaaccctatcccgctaactatccctatccactcattggaacaactgccgtaaatagtgttacgcagaaaaagttcttgtgtgacagaaccatgtggcgcataccgttctcgagcaacttcatgtctatgggggcccttacagacttgggacagaatatgctctatgccaactcagctcatgctctggacatgacctttgaggtggatcccatggatgagcccaccctgctttatcttctcttcgaagttttcgacgtggtcagagtgcatcagccacaccgcggcatcatcgaggcagtctacctgcgtacaccgttctcggccggtaacgctaccacgtaagaagcttcttgcttcttgcaaatagcagctgcaaccatggcctgcggatcccaaaacggctccagcgagcaagagctcagagccattgtccaagacctgggttgcggaccctattttttgggaacctacgataagcgcttcccggggttcatggcccccgataagctcgcctgtgccattgtaaatacggccggacgtgagacggggggagagcactggttggctttcggttggaacccacgttctaacacctgctacctttttgatccttttggattctcggatgatcgtctcaaacagatttaccagtttgaatatgagggtctcctgcgccgcagcgctcttgctaccaaggaccgctgtattacgctggaaaaatctacccagaccgtgcagggtccccgttctgccgcctgcggacttttctgctgcatgttccttcacgcctttgtgcactggcctgaccgtcccatggacggaaaccccaccatgaaattgctaactggagtgccaaacaacatgcttcattctcctaaagtccagcccaccctgtgtgacaatcaaaaagcactctaccattttcttaatacccattcgccttattttcgctcccatcgtacacacatcgaaagggccactgcgttcgaccgtatggatgttcaataatgactcatgtaaacaacgtgttcaataaacatcactttatttttttacatgtatcaaggctctgcattacttatttatttacaagtcgaatgggttctgacgagaatcagaatgacccgcaggcagtgatacgttgcggaactgatacttgggttgccacttgaattcgggaatcaccaacttgggaaccggtatatcgggcaggatgtcactccacagctttctggtcagctgcaaagctccaagcaggtcaggagccgaaatcttgaaatcacaattaggaccagtgctttgagcgcgagagttgcggtacaccggattgcagcactgaaacaccatcagcgacggatgtctcacgcttgccagcacggtgggatctgcaatcatgcccacatccagatcttcagcattggcaatgctgaacggggtcatcttgcaggtctgcctacccatggcgggcacccaattaggcttgtggttgcaatcgcagtgcagggggatcagtatcatcttggcctgatcctgtctgattcctggatacacggctctcatgaaagcatcatattgcttgaaagcctgctgggctttactaccctcggtataaaacatcccgcaggacctgctcgaaaactggttagctgcacagccggcatcattcacacagcagcgggcgtcattgttagctatttgcaccacacttctgccccagcggttttgggtgattttggttcgctcgggattctcctttaaggctcgttgtccgttctcgctggccacatccatctcgataatctgctccttctgaatcataatattgccatgcaggcacttcagcttgccctcataatcattgcagccatgaggccacaacgcacagcctgtacattcccaattatggtgggcgatctgagaaaaagaatgtatcattccctgcagaaatcttcccatcatcgtgctcagtgtcttgtgactagtgaaagttaactggatgcctcggtgctcctcgtttacgtactggtgacagatgcgcttgtattgttcgtgttgctcaggcattagtttaaaagaggttctaagttcgttatccagcctgtacttctccatcagcagacacatcacttccatgcctttctcccaagcagacaccaggggcaagctaatcggattcttaacagtgcaggcagcagctcctttagccagagggtcatctttagcgatcttctcaatgcttcttttgccatccttctcaacgatgcgcacgggcgggtagctgaaacccactgctacaagttgcgcctcttctctttcttcttcgctgtcttgactgatgtcttgcatggggatatgtttggtcttccttggcttctttttggggggtatcggaggaggaggactgtcgctccgttccggagacagggaggattgtgacgtttcgctcaccattaccaactgactgtcggtagaagaacctgaccccacacggcgacaggtgtttctcttcgggggcagaggtggaggcgattgcgaagggctgcggtccgacctggaaggcggatgactggcagaaccccttccgcgttcgggggtgtgctccctgtggcggtcgcttaactgatttccttcgcggctggccattgtgttctcctaggcagagaaacaacagacatggaaactcagccattgctgtcaacatcgccacgagtgccatcacatctcgtcctcagcgacgaggaaaaggagcagagcttaagcattccaccgcccagtcctgccaccacctctaccctagaagataaggaggtcgacgcatctcatgacatgcagaataaaaaagcgaaagagtctgagacagacatcgagcaagacccgggctatgtgacaccggtggaacacgaggaagagttgaaacgctttctagagagagaggatgaaaactgcccaaaacaacgagcagataactatcaccaagatgctggaaatagggatcagaacaccgactacctcatagggcttgacggggaagacgcgctccttaaacatctagcaagacagtcgctcatagtcaaggatgcattattggacagaactgaagtgcccatcagtgtggaagagctcagccgcgcctacgagcttaacctcttttcacctcgtactccccccaaacgtcagccaaacggcacctgcgagccaaatcctcgcttaaacttttatccagcttttgctgtgccagaagtactggctacctatcacatcttttttaaaaatcaaaaaattccagtctcctgccgcgctaatcgcacccgcgccgatgccctactcaatctgggacctggttcacgcttacctgatatagcttccttggaagaggttccaaagatcttcgagggtctgggcaataatgagactcgggccgcaaatgctctgcaaaagggagaaaatggcatggatgagcatcacagcgttctggtggaattggaaggcgataatgccagactcgcagtactcaagcgaagcatcgaggtcacacacttcgcatatcccgctgtcaacctgccccctaaagtcatgacggcggtcatggaccagttactcattaagcgcgcaagtcccctttcagaagacatgcatgacccagatgcctgtgatgagggtaaaccagtggtcagtgatgagcagctaacccgatggctgggcaccgactctcccagggatttggaagagcgtcgcaagcttatgatggccgtggtgctggttaccgtagaactagagtgtctccgacgtttctttaccgattcagaaaccttgcgcaaactcgaagagaatctgcactacacttttagacacggctttgtgcggcaggcatgcaagatatctaacgtggaactcaccaacctggtttcctacatgggtattctgcatgagaatcgcctaggacaaagcgtgctgcacagcaccctgaagggggaagcccgccgtgattacatccgcgattgtgtctatctgtacctgtgccacacgtggcaaaccggcatgggtgtatggcagcaatgtttagaagaacagaacttgaaagagcttgacaagctcttacagaaatctcttaaggttctgtggacagggttcgacgagcgcaccgtcgcttccgacctggcagacctcatcttcccagagcgtctcagggttactttgcgaaacggattgcctgactttatgagccagagcatgcttaacaattttcgctctttcatcctggaacgctccggtatcctgcccgccacctgctgcgcactgccctccgactttgtgcctctcacctaccgcgagtgccccccgccgctatggagtcactgctacctgttccgtctggccaactatctctcctaccactcggatgtgatcgaggatgtgagcggagacggcttgctggagtgtcactgccgctgcaatctgtgcacgccccaccggtccctagcttgcaacccccagttgatgagcgaaacccagataataggcacctttgaattgcaaggccccagcagccaaggcgatgggtcttctcctgggcaaagtttaaaactgaccccgggactgtggacctccgcctacttgcgcaagtttgctccggaagattaccacccctatgaaatcaagttctatgaggaccaatcacagcctccaaaggccgaactttcggcctgcgtcatcacccagggggcaattctggcccaattgcaagccatccaaaaatcccgccaagaatttctactgaaaaagggtaagggggtctaccttgacccccagaccggcgaggaactcaacacaaggttccctcaggatgtcccaacgacgagaaaacaagaagttgaaggtgcagccgccgcccccagaagatatggaggaagattgggacagtcaggcagaggaggcggaggaggacagtctggaggacagtctggaggaagacagtttggaggaggaaaacgaggaggcagaggaggtggaagaagtaaccgccgacaaacagttatcctcggctgcggagacaagcaacagcgctaccatctccgctccgagtcgaggaacccggcggcgtcccagcagtagatgggacgagaccggacgcttcccgaacccaaccagcgcttccaagaccggtaagaaggatcggcagggatacaagtcctggcgggggcataagaatgccatcatctcctgcttgcatgagtgcgggggcaacatatccttcacgcggcgctacttgctattccaccatggggtgaactttccgcgcaatgttttgcattactaccgtcacctccacagcccctactatagccagcaaatcccggcagtctcgacagataaagacagcggcggcgacctccaacagaaaaccagcagcggcagttagaaaatacacaacaagtgcagcaacaggaggattaaagattacagccaacgagccagcgcaaacccgagagttaagaaatcggatctttccaaccctgtatgccatcttccagcagagtcggggtcaagagcaggaactgaaaataaaaaaccgatctctgcgttcgctcaccagaagttgtttgtatcacaagagcgaagatcaacttcagcgcactctcgaggacgccgaggctctcttcaacaagtactgcgcgctgactcttaaagagtaggcagcgaccgcgcttattcaaaaaaggcgggaattacatcatcctcgacatgagtaaagaaattcccacgccttacatgtggagttatcaaccccaaatgggattggcggcaggcgcctcccaggactactccacccgcatgaattggctcagcgccgggccttctatgatttctcgagttaatgatatacgcgcctaccgaaaccaaatacttttggaacagtcagctcttaccaccacgccccgccaacaccttaatcccagaaattggcccgccgccctagtgtaccaggaaagtcccgctcccaccactgtattacttcctcgagacgcccaggccgaagtccaaatgactaatgcaggtgcgcagttagctggcggctccaccctatgtcgtcacaggcctcggcataatataaaacgcctgatgatcagaggccgaggtatccagctcaacgacgagtcggtgagctctccgcttggtctacgaccagacggaatctttcagattgccggctgcgggagatcttccttcacccctcgtcaggctgttctgactttggaaagttcgtcttcgcaaccccgctcgggcggaatcgggaccgttcaatttgtggaggagtttactccctctgtctacttcaaccccttctccggatctcctgggcattacccggacgagttcataccgaacttcgacgcgattagcgagtcagtggacggctacgattgatgtctggtgacgcggctgagctatctcggctgcgacatctagaccactgccgccgctttcgctgctttgcccgggaactcattgagttcatctacttcgaactccccaaggatcaccctcaaggtccggcccacggagtgcggatttctatcgaaggcaaaatagactctcgcctgcaacgaattttctcccagcggcccgtgctgatcgagcgagaccagggaaacaccacggtttccatctactgcatttgtaatcaccccggattgcatgaaagcctttgctgtcttatgtgtactgagtttaataaaaactgaattaagactctcctacggactgccgcttcttcaacccggattttacaaccagaagaacgaaacttttcctgtcgtccaggactctgttaacttcacctttcctactcacaaactagaagctcaacgactacaccgcttttccagaagcattttccctactaatactactttcaaaaccggaggtgagctccaaggtcttcctacagaaaacccttgggtggaagcgggccttgtagtgctaggaattcttgcgggtgggcttgtgattattctttgctacctatacacaccttgcttcactttcttagtggtgttgtggtattggtttaaaaaatggggcccatactagtcttgcttgttttactttcgcttttggaaccgggttctgccaattacgatccatgtctagacttcgacccagaaaactgcacacttacttttgcacccgacacaagccgcatctgtggagttcatcgcctctcttacgaacttggcccccaacgacaaaaatttacctgcatggtgggaatcaaccccatagttatcacccagcaaagtggagatactaagggttgcattcactgctcctgcgattccatcgagtgcacctacaccctgctgaagaccctatgcggcctaagagacctgctaccaatgaattaaaaaatgattaataaaaaatcacttacttgaaatcagcaataaggtctctgttgaaattttctcccagcagcacctcacttccctcttcccaactctggtattctaaaccccgttcagcggcatactttctccatactttaaaggggatgtcaaattttagctcctctcctgtacccacaatcttcatgtctttcttcccagatgaccaagagagtccggctcagtgactccttcaaccctgtctacccctatgaagatgaaagcacctcccaacacccctttataaacccagggtttatttccccaaatggcttcacacaaagcccaaacggagttcttactttaaaatgtttaaccccactaacaaccacaggcggatctctacagctaaaagtgggagggggacttacagtggatgacaccaacggttttttgaaagaaaacataagtgccaccacaccactcgttaagactggtcactctataggtttaccactaggagccggattgggaacgaatgaaaataaactttgtatcaaattaggacaaggacttacattcaattcaaacaacatttgcattgatgacaatattaacaccttatggacaggagtcaaccccaccgaagccaactgtcaaatcatgaactccagtgaatctaatgattgcaaattaattctaacactagttaaaactggagcactagtcactgcatttgtttatgttataggagtatctaacaattttaatatgctaactacacacagaaatataaattttactgcagagctgtttttcgattctactggtaatttactaactagactctcatccctcaaaactccacttaatcataaatcaggacaaaacatggctactggtgccattactaatgctaaaggtttcatgcccagcacgactgcctatcctttcaatgataattctagagaaaaagaaaactacatttacggaacttgttactacacagctagtgatcgcactgcttttcccattgacatatctgtcatgcttaaccgaagagcaataaatgacgagacatcatattgtattcgtataacttggtcctggaacacaggagatgccccagaggtgcaaacctctgctacaaccctagtcacctccccatttaccttttactacatcagagaagacgactgacaaataaagtttgcgatcgccaggcccaccatggccccgcggcgggcgcgcggctgccggaccctcggtctcccggcgctgctactgctgctgctgctccggccgccggcgacgcggggcatcacgtgccctccccccatgtccgtggaacacgcagacatctgggtcaagagctacagcttgtactccagggagcggtacatttgtaactctggtttcaagcgtaaagccggcacgtccagcctgacggagtgcgtgttgaacaaggccacgaatgtcgcccactggacaacccccagtctcaaatgcattagagacggaggcggcggttcagctgtgggccaggacacgcaggaggtcatcgtggtgccacactccttgccctttaaggtggtggtgatctcagccatcctggccctggtggtgctcaccatcatctcccttatcatcctcatcatgctttggcagaagaagccacgttaagctagcttgactgactgagatacagcgtaccttcagctcacagacatgataagatacattgatgagtttggacaaaccacaactagaatgcagtgaaaaaaatgctttatttgtgaaatttgtgatgctattgctttatttgtaaccattataagctgcaataaacaagttaacaacaacaattgcattcattttatgtttcaggttcagggggaggtgtgggaggttttttaaagcaagtaaaacctctacaaatgtggtagtcgtcagctatcctgcaggaacttgtttatttgaaaatcaattcacaaaatccgagtagttattttgcctcccccttcccatttaacagaatacaccaatctctccccacgcacagctttaaacatttggataccattagatatagacatggttttagattccacattccaaacagtttcagagcgagccaatctggggtcagtgatagataaaaatccatcgggatagtcttttaaagcgctttcacagtccaactgctgcggatgcgactccggagtctggatcacggtcatctggaagaagaacgatgggaatcataatccgaaaacggtatcggacgattgtgtctcatcaaacccacaagcagccgctgtctgcgtcgctccgtgcgactgctgtttatgggatcagggtccacagtgtcctgaagcatgattttaatagcccttaacatcaactttctggtgcgatgcgcgcagcaacgcattctgatttcactcaaatctttgcagtaggtacaacacattattacaatattgtttaataaaccataattaaaagcgctccagccaaaactcatatctgatataatcgcccctgcatgaccatcataccaaagtttaatataaattaaatgacgttccctcaaaaacacactacccacatacatgatctcttttggcatgtgcatattaacaatctgtctgtaccatggacaacgttggttaatcatgcaacccaatataaccttccggaaccacactgccaacaccgctcccccagccatgcattgaagtgaaccctgctgattacaatgacaatgaagaacccaattctctcgaccgtgaatcacttgagaatgaaaaatatctatagtggcacaacatagacataaatgcatgcatcttctcataatttttaactcctcaggatttagaaacatatcccagggaataggaagctcttgcagaacagtaaagctggcagaacaaggaagaccacgaacacaacttacactatgcatagtcatagtatcacaatctggcaacagcgggtggtcttcagtcatagaagctcgggtttcattttcctcacaacgtggtaactgggctctggtgtaagggtgatgtctggcgcatgatgtcgagcgtgcgcgcaaccttgtcataatggagttgcttcctgacattctcgtattttgtatagcaaaacgcggccctggcagaacacactcttcttcgccttctatcctgccgcttagcgtgttccgtgtgatagttcaagtacaaccacactcttaagttggtcaaaagaatgctggcttcagttgtaatcaaaactccatcgcatctaatcgttctgaggaaatcatccaagcaatgcaactggattgtgtttcaagcaggagaggagagggaagagacggaagaaccatgttaatttttattccaaacgatctcgcagtacttcaaattgtagatcgcgcagatggcatctctcgcccccactgtgttggtgaaaaagcacagctagatcaaaagaaatgcgattttcaaggtgctcaacggtggcttccagcaaagcctccacgcgcacatccaagaacaaaagaataccaaaagaaggagcattttctaactcctcaatcatcatattacattcctgcaccattcccagataattttcagctttccagccttgaattattcgtgtcagttcttgtggtaaatccaatccacacattacaaacaggtcccggagggcgccctccaccaccattcttaaacacaccctcataatgacaaaatatcttgctcctgtgtcacctgtagcgaattgagaatggcaacatcaattgacatgcccttggctctaagttcttctttaagttctagttgtaaaaactctctcatattatcaccaaactgcttagccagaagccccccgggaacaagagcaggggacgctacagtgcagtacaagcgcagacctccccaattggctccagcaaaaacaagattggaataagcatattgggaaccgccagtaatatcatcgaagttgctggaaatataatcaggcagagtttcttgtaaaaattgaataaaagaaaaatttgccaaaaaaacattcaaaacctctgggatgcaaatgcaataggttaccgcgctgcgctccaacattgttagttttgaattagtctgcaaaaataaaaaaaaaaacaagcgtcatatcatagtagcctgacgaacagatggataaatcagtctttccatcacaagacaagccacagggtctccagctcgaccctcgtaaaacctgtcatcatgattaaacaacagcaccgaaagttcctcgcggtgaccagcatgaataattcttgatgaagcatacaatccagacatgttagcatcagttaacgagaaaaaacagccaacatagcctttgggtataattatgcttaatcgtaagtatagcaaagccacccctcgcggatacaaagtaaaaggcacaggagaataaaaaatataattatttctctgctgctgttcaggcaacgtcgcccccggtccctctaaatacacatacaaagcctcatcagccatggcttaccagacaaagtacagcgggcacacaaagcacaagctctaaagtgactctccaacctctccacaatatatatatacacaagccctaaactgacgtaatgggagtaaagtgtaaaaaatcccgccaaacccaacacacaccccgaaactgcgtcaccagggaaaagtacagtttcacttccgcaatcccaacaggcgtaacttcctctttctcacggtacgtgatatcccactaacttgcaacgtcattttcccacggtcgcaccgccccttttagccgttaaccccacagccaatcaccacacgatccacactttttaaaatcacctcatttacatattggcaccattccatctataaggtatattatatagataga

SEQ ID NO: 92 - DNA, 33094 bp, Artificial Sequence
  Genome sequence of NG-746 virus
tctatctatataatataccttatagatggaatggtgccaatatgtaaatgaggtgattttaaaaagtgtggatcgtgtggtgattggctgtggggttaacggctaaaaggggcggtgcgaccgtgggaaaatgacgttttgtgggggtggagtttttttgcaagttgtcgcgggaaatgtgacgcataaaaaggcttttttctcacggaactacttagttttcccacggtatttaacaggaaatgaggtagttttgaccggatgcaagtgaaaattgttgattttcgcgcgaaaactgaatgaggaagtgtttttctgaataatgtggtatttatggcagggtggagtatttgttcagggccaggtagactttgacccattacgtggaggtttcgattaccgtgttttttacctgaatttccgcgtaccgtgtcaaagtcttctgtttttacgtaggtgtcagctgatcgctagggtatttatacctcagggtttgtgtcaagaggccactcttgagtgccagcgagaagagttttctcctctgcgccggcagtttaataataaaaaaatgagagatttgcgatttctgcctcaggaaataatctctgctgagactggaaatgaaatattggagcttgtggtgcacgccctgatgggagacgatccggagccacctgtgcagctttttgagcctcctacgcttcaggaactgtatgatttagaggtagagggatcggaggattctaatgaggaagctgtaaatggcttttttaccgattctatgcttttagctgctaatgaagggttagaattagatccgcctttggacacttttgatactccaggggtaattgtggaaagcggtacaggtgtaagaaaattacctgatttgagttccgtggactgtgatttgcactgctatgaagacgggtttcctccgagtgatgaggaggaccatgaaaaggagcagtccatgcagactgcagcgggtgagggagtgaaggctgccaatgttggttttcagttggattgcccggagcttcctggacatggctgtaagtcttgtgaatttcacaggaaaaatactggagtaaaggaactgttatgttcgctttgttatatgagaacgcactgccactttatttacagtaagtgtgtttaagttaaaatttaaaggaatatgctgtttttcacatgtatattgagtgtgagttttgtgcttcttattataggtcctgtgtctgatgctgatgaatcaccatctcctgattctactacctcacctcctgagattcaagcacctgttcctgtggacgtgcgcaagcccattcctgtgaagcttaagcctgggaaacgtccagcagtggaaaaacttgaggacttgttacagggtggggacggacctttggacttgagtacacggaaacgtccaagacaataagtgttccatatccgtgtttacttaaggtgacgtcaatatttgtgtgacagtgcaatgtaataaaaatatgttaactgttcactggtttttattgctttttgggcggggactcaggtatataagtagaagcagacctgtgtggttagctcataggagctggctttcatccatggaggtttgggccattttggaagaccttaggaagactaggcaactgttagagaacgcttcggacggagtctccggtttttggagattctggttcgctagtgaattagctagggtagtttttaggataaaacaggactataaacaagaatttgaaaagttgttggtagattgcccaggactttttgaagctcttaatttgggccatcaggttcactttaaagaaaaagttttatcagttttagacttttcaaccccaggtagaactgctgctgctgtggcttttcttacttttatattagataaatggatcccgcagactcatttcagcaggggatacgttttggatttcatagccacagcattgtggagaacatggaaggttcgcaagatgaggacaatcttaggttactggccagtgcagcctttgggtgtagcgggaatcctgaggcatccaccggtcatgccagcggttctggaggaggaacagcaagaggacaacccgagagccggcctggaccctccagtggaggaggcggagtagctgacttgtctcctgaactgcaacgggtgcttactggatctacgtccactggacgggataggggcgttaagagggagagggcatctagtggtactgatgctagatctgagttggctttaagtttaatgagtcgcagacgtcctgaaaccatttggtggcatgaggttcagaaagagggaagggatgaagtttctgtattgcaggagaaatattcactggaacaggtgaaaacatgttggttggagcctgaggatgattgggaggtggccattaaaaattatgccaagatagctttgaggcctgataaacagtataagattactagacggattaatatccggaatgcttgttacatatctggaaatggggctgaggtggtaatagatactcaagacaaggcagttattagatgctgcatgatggatatgtggcctggggtagtcggtatggaagcagtaacttttgtaaatgttaagtttaggggagatggttataatggaatagtgtttatggccaataccaaacttatattgcatggttgtagcttttttggtttcaacaatacctgtgtagatgcctggggacaggttagtgtacggggatgtagtttctatgcgtgttggattgccacagctggcagaaccaagagtcaattgtctctgaagaaatgcatatttcaaagatgtaacctgggcattctgaatgaaggcgaagcaagggtccgccactgcgcttctacagatactggatgttttattttgattaagggaaatgccagcgtaaagcataacatgatttgcggtgcttccgatgagaggccttatcaaatgctcacttgtgctggtgggcattgtaatatgctggctactgtgcatattgtttcccatcaacgcaaaaaatggcctgtttttgatcacaatgtgatgacgaagtgtaccatgcatgcaggtgggcgtagaggaatgtttatgccttaccagtgtaacatgaatcatgtgaaagtgttgttggaaccagatgccttttccagaatgagcctaacaggaatttttgacatgaacatgcaaatctggaagatcctgaggtatgatgatacgagatcgagggtacgcgcatgcgaatgcggaggcaagcatgccaggttccagccggtgtgtgtagatgtgactgaagatctcagaccggatcatttggttattgcccgcactggagcagagttcggatccagtggagaagaaactgactaaggtgagtattgggaaaactttggggtgggattttcagatggacagattgagtaaaaatttgttttttctgtcttgcagctgtcatgagtggaaacgcttcttttaaggggggagtcttcagcccttatctgacagggcgtctcccatcctgggcaggagttcgtcagaatgttatgggatctactgtggatggaagacccgtccaacccgccaattcttcaacgctgacctatgctactttaagttcttcacctttggacgcagctgcagctgccgccgccgcttctgttgccgctaacactgtgcttggaatgggttactatggaagcatcatggctaattccacttcctctaataacccttctaccctgactcaggacaagttacttgtccttttggcccagctggaggctttgacccaacgtctgggtgaactttctcagcaggtggtcgagttgcgagtacaaactgagtctgctgtcggcacggcaaagtctaaataaaaaaatcccagaatcaatgaataaataaacaagcttgttgttgatttaaaatcaagtgtttttatttcatttttcgcgcacggtatgccctagaccaccgatctctatcattgagaactcggtggattttttccaggatcctatagaggtgggattgaatgtttagatacatgggcattaggccgtctttggggtggagatagctccattgaagggattcatgctccggggtagtgttgtaaatcacccagtcataacaaggtcgcagtgcatggtgttgcacaatatcttttagaagtaggctgattgccacagataagcccttggtgtaggtgtttacaaaccggttgagctgggatgggtgcattcggggtgaaattatgtgcattttggattggatttttaagttggcaatattgccgccaagatcccgtcttgggttcatgttatgaaggaccaccaagacggtgtatccggtacatttaggaaatttatcgtgcagcttggatggaaaagcgtggaaaaatttggagacacccttgtgtcctccaagattttccatgcactcatccatgataatagcaatggggccgtgggcagcggcgcgggcaaacacgttccgtgggtctgacacatcatagttatgttcctgagttaaatcatcataagccattttaatgaatttggggcggagagtaccagattggggtatgaatgttccttcgggccccggagcatagttcccctcacagatttgcatttcccaagctttcagttccgagggtggaatcatgtccacctggggggctatgaaaaacaccgtttctggggcgggggtgattaattgtgatgatagcaaatttctgagcaattgagatttgccacatccggtggggccataaatgattccgattacgggttgcaggtggtagtttagggaacggcaactgccgtcttctcgaagcaagggggccacctcgttcatcatttcccttacatgcatattttcccgcaccaaatccattaggaggcgctctcctcctagtgatagaagttcttgtagtgaggaaaagtttttcagcggtttcagaccgtcagccatgggcattttggagagagtttgctgcaaaagttctagtctgttccacagttcagtgatgtgttctatggcatctcgatccagcagacctcctcgtttcgcgggtttggacggctcctggaatagggtatgagacgatgggcgtccagcgctgccagggttcggtccttccagggtctcagtgttcgagtcagggttgtttccgtcacagtgaaggggtgtgcgcctgcttgggcgcttgccagggtgcgcttcagactcatcctgctggtcgaaaacttctgtcgcttggcgccctgtatgtcggccaagtagcagtttaccatgagttcgtagttgagcgcctcggctgcgtggcctttggcgcggagcttacctttggaagttttcttgcataccgggcagtataggcatttcagcgcatacaacttgggcgcaaggaaaacggattctggggagtatgcatctgcgccgcaggaggcgcaaacagtttcacattccaccagccaggttaaatccggttcattggggtcaaaaacaagttttccgccatattttttgatgcgtttcttacctttggtctccatgagttcgtgtcctcgttgagtgacaaacaggctgtccgtgtccccgtagactgattttacaggcctcttctccagtggagtgcctcggtcttcttcgtacaggaactctgaccactctgatacaaaggcgcgcgtccaggccagcacaaaggaggctatgtgggaggggtagcgatcgttgtcaaccagggggtccaccttttccaaagtatgcaaacacatgtcaccctcttcaacatccaggaatgtgattggcttgtaggtgtatttcacgtgacctggggtccccgctgggggggtataaaagggggcggttctttgctcttcctcactgtcttccggatcgctgtccaggaacgtcagctgttggggtaggtattccctctcgaaggcgggcatgacctctgcactcaggttgtcagtttctaagaacgaggaggatttgatattgacagtgccggttgagatgcctttcatgaggttttcgtccatctggtcagaaaacacaatttttttattgtcaagtttggtggcaaatgatccatacagggcgttggataaaagtttggcaatggatcgcatggtttggttcttttccttgtccgcgcgctctttggcggcgatgttgagttggacatactcgcgtgccaggcacttccattcggggaagatagttgttaattcatctggcacgattctcacttgccaccctcgattatgcaaggtaattaaatccacactggtggccacctcgcctcgaaggggttcattggtccaacagagcctacctcctttcctagaacagaaagggggaagtgggtctagcataagttcatcgggagggtctgcatccatggtaaagattcccggaagtaaatccttatcaaaatagctgatgggagtggggtcatctaaggccatttgccattctcgagctgccagtgcgcgctcatatgggttaaggggactgccccatggcatgggatgggtgagtgcagaggcatacatgccacagatgtcatagacgtagatgggatcctcaaagatgcctatgtaggttggatagcatcgcccccctctgatacttgctcgcacatagtcatatagttcatgtgatggcgctagcagccccggacccaagttggtgcgattgggtttttctgttctgtagacgatctggcgaaagatggcgtgagaattggaagagatggtgggtctttgaaaaatgttgaaatgggcatgaggtagacctacagagtctctgacaaagtgggcataagattcttgaagcttggttaccagttcggcggtgacaagtacgtctagggcgcagtagtcaagtgtttcttgaatgatgtcataacctggttggtttttcttttcccacagttcgcggttgagaaggtattcttcgcgatccttccagtactcttctagcggaaacccgtctttgtctgcacggtaagatcctagcatgtagaactgattaactgccttgtaagggcagcagcccttctctacgggtagagagtatgcttgagcagcttttcgtagcgaagcgtgagtaagggcaaaggtgtctctgaccatgactttgaggaattggtatttgaagtcgatgtcgtcacaggctccctgttcccagagttggaagtctacccgtttcttgtaggcggggttgggcaaagcgaaagtaacatcattgaagagaatcttgccggccctgggcatgaaattgcgagtgatgcgaaaaggctgtggtacttccgctcggttattgataacctgggcagctaggacgatctcgtcgaaaccgttgatgttgtgtcctacgatgtataattctatgaaacgcggcgtgcctctgacgtgaggtagcttactgagctcatcaaaggttaggtctgtggggtcagataaggcgtagtgttcgagagcccattcgtgcaggtgaggattcgctttaaggaaggaggaccagaggtccactgccagtgctgtttgtaactggtcccggtactgacgaaaatgccgtccgactgccattttttctggggtgacgcaatagaaggtttgggggtcctgccgccagcgatcccacttgagttttatggcgaggtcataggcgatgttgacgagccgctggtctccagagagtttcatgaccagcatgaaggggattagctgcttgccaaaggaccccatccaggtgtaggtttccacatcgtaggtgagaaagagcctttctgtgcgaggatgagagccaatcgggaagaactggatctcctgccaccagttggaggaatggctgttgatgtgatggaagtagaactccctgcgacgcgccgagcattcatgcttgtgcttgtacagacggccgcagtagtcgcagcgttgcacgggttgtatctcgtgaatgagttgtacctggcttcccttgacgagaaatttcagtgggaagccgaggcctggcgattgtatctcgtgctttactatgttgtctgcatcggcctgttcatcttctgtctcgatggtggtcatgctgacgagccctcgcgggaggcaagtccagacctcggcgcggcaggggcggagctcgaggacgagagcgcgcaggctggagctgtccagggtcctgagacgctgcggactcaggttagtaggcagtgtcaggagattaacttgcatgatcttttggagggcgtgcgggaggttcagatagtacttgatctcaacgggtccgttggtggagatgtcgatggcttgcagggttccgtgtcccttgggcgctaccaccgtgcccttgtttttcattttggacggcggtggctctgttgcttcttgcatgtttagaagcggtgtcgagggcgcgcaccgggcggcaggggcggctcgggacccggcggcatggctggcagtggtacgtcggcgccgcgcgcgggtaggttctggtactgcgccctgagaagactcgcatgcgcgacgacgcggcggttgacatcctggatctgacgcctctgggtgaaagctaccggccccgtgagcttgaacctgaaagagagttcaacagaatcaatctcggtatcgttgacggcggcttgcctaaggatttcttgcacgtcaccagagttgtcctggtaggcgatctccgccatgaactgctcgatctcttcctcttgaagatctccgcggcccgctctctcgacggtggccgcgaggtcgttggagatgcgcccaatgagttgagagaatgcattcatgcccgcctcgttccagacgcggctgtagaccacggcccccacgggatctctcgcgcgcatgaccacctgggcgaggttgagctccacgtggcgggtgaagaccgcatagttgcataggcgctggaaaaggtagttgagtgtggtggcgatgtgctcggtgacgaagaaatacatgatccatcgtctcagcggcatctcgctgacatcgcccagagcttccaagcgctccatggcctcgtagaagtccacggcaaaattaaaaaactgggagtttcgcgcggacacggtcaactcctcttccagaagacggataagttcggcgatggtggtgcgcacctcgcgctcgaaagcccctgggatttcttcctcaatctcttcttcttccactaacatctcttcctcttcaggtggggctgcaggaggagggggaacgcggcgacgccggcggcgcacgggcagacggtcgatgaatctttcaatgacctctccgcggcggcggcgcatggtttcagtgacggcgcggccgttctcgcgcggtcgcagagtaaaaacaccgccgcgcatctccttaaagtggtgactgggaggttctccgtttgggagggagagggcgctgattatacattttattaattggcccgtagggactgcacgcagagatctgatcgtgtcaagatccacgggatctgaaaacctttcgacgaaagcgtctaaccagtcacagtcacaaggtaggctgagtacggcttcttgtgggcgggggtggttatgtgttcggtctgggtcttctgtttcttcttcatctcgggaaggtgagacgatgctgctggtgatgaaattaaagtaggcagttctaagacggcggatggtggcgaggagcaccaggtctttgggtccggcttgctggatacgcaggcgattggccattccccaagcattatcctgacatctagcaagatctttgtagtagtcttgcatgagccgttctacgggcacttcttcctcacccgttctgccatgcatacgtgtgagtccaaatccgcgcattggttgtaccagtgccaagtcagctacgactctttcggcgaggatggcttgctgtacttgggtaagggtggcttgaaagtcatcaaaatccacaaagcggtggtaagctcctgtattaatggtgtaagcacagttggccatgactgaccagttaactgtctggtgaccagggcgcacgagctcggtgtatttaaggcgcgaataggcgcgggtgtcaaagatgtaatcgttgcaggtgcgcaccagatactggtaccctataagaaaatgcggcggtggttggcggtagagaggccatcgttctgtagctggagcgccaggggcgaggtcttccaacataaggcggtgatagccgtagatgtacctggacatccaggtgattcctgcggcggtagtagaagcccgaggaaactcgcgtacgcggttccaaatgttgcgtagcggcatgaagtagttcattgtaggcacggtttgaccagtgaggcgcgcgcagtcattgatgctctatagacacggagaaaatgaaagcgttcagcgactcgactccgtagcctggaggaacgtgaacgggttgggtcgcggtgtaccccggttcgagacttgtactcgagccggccggagccgcggctaacgtggtattggcactcccgtctcgacccagcctacaaaaatccaggatacggaatcgagtcgttttgctggtttccgaatggcagggaagtgagtcctattttttttttttgccgctcagatgcatcccgtgctgcgacagatgcgcccccaacaacagcccccctcgcagcagcagcagcagcaatcacaaaaggctgtccctgcaactactgcaactgccgccgtgagcggtgcgggacagcccgcctatgatctggacttggaagagggcgaaggactggcacgtctaggtgcgccttcacccgagcggcatccgcgagttcaactgaaaaaagattctcgcgaggcgtatgtgccccaacagaacctatttagagacagaagcggcgaggagccggaggagatgcgagcttcccgctttaacgcgggtcgtgagctgcgtcacggtttggaccgaagacgagtgttgcgggacgaggatttcgaagttgatgaaatgacagggatcagtcctgccagggcacacgtggctgcagccaaccttgtatcggcttacgagcagacagtaaaggaagagcgtaacttccaaaagtcttttaataatcatgtgcgaaccctgattgcccgcgaagaagttacccttggtttgatgcatttgtgggatttgatggaagctatcattcagaaccctactagcaaacctctgaccgcccagctgtttctggtggtgcaacacagcagagacaatgaggctttcagagaggcgctgctgaacatcaccgaacccgaggggagatggttgtatgatcttatcaacattctacagagtatcatagtgcaggagcggagcctgggcctggccgagaaggtggctgccatcaattactcggttttgagcttgggaaaatattacgctcgcaaaatctacaagactccatacgttcccatagacaaggaggtgaagatagatgggttctacatgcgcatgacgctcaaggtcttgaccctgagcgatgatcttggggtgtatcgcaatgacagaatgcatcgcgcggttagcgccagcaggaggcgcgagttaagcgacagggaactgatgcacagtttgcaaagagctctgactggagctggaaccgagggtgagaattacttcgacatgggagctgacttgcagtggcagcctagtcgcagggctctgagcgccgcgacggcaggatgtgagcttccttacatagaagaggcggatgaaggcgaggaggaagagggcgagtacttggaagactgatggcacaacccgtgttttttgctagatggaacagcaagcaccggatcccgcaatgcgggcggcgctgcagagccagccgtccggcattaactcctcggacgattggacccaggccatgcaacgtatcatggcgttgacgactcgcaaccccgaagcctttagacagcaaccccaggccaaccgtctatcggccatcatggaagctgtagtgccttcccgctctaatcccactcatgagaaggtcctggccatcgtgaacgcgttggtggagaacaaagctattcgtccagatgaggccggactggtatacaacgctctcttagaacgcgtggctcgctacaacagtagcaatgtgcaaaccaatttggaccgtatgataacagatgtacgcgaagccgtgtctcagcgcgaaaggttccagcgtgatgccaacctgggttcgctggtggcgttaaatgctttcttgagtactcagcctgctaatgtgccgcgtggtcaacaggattatactaactttttaagtgctttgagactgatggtatcagaagtacctcagagcgaagtgtatcagtccggtcctgattacttctttcagactagcagacagggcttgcagacggtaaatctgagccaagcttttaaaaaccttaaaggtttgtggggagtgcatgccccggtaggagaaagagcaaccgtgtctagcttgttaactccgaactcccgcctattattactgttggtagctcctttcaccgacagcggtagcatcgaccgtaattcctatttgggttacctactaaacctgtatcgcgaagccatagggcaaagtcaggtggacgagcagacctatcaagaaattacccaagtcagtcgcgctttgggacaggaagacactggcagtttggaagccactctgaacttcttgcttaccaatcggtctcaaaagatccctcctcaatatgctcttactgcggaggaggagaggatccttagatatgtgcagcagagcgtgggattgtttctgatgcaagagggggcaactccgactgcagcactggacatgacagcgcgaaatatggagcccagcatgtatgccagtaaccgacctttcattaacaaactgctggactacttgcacagagctgccgctatgaactctgattatttcaccaatgccatcttaaacccgcactggctgcccccacctggtttctacacgggcgaatatgacatgcccgaccctaatgacggatttctgtgggacgacgtggacagcgatgttttttcacctctttctgatcatcgcacgtggaaaaaggaaggcggcgatagaatgcattcttctgcatcgctgtccggggtcatgggtgctaccgcggctgagcccgagtctgcaagtccttttcctagtctacccttttctctacacagtgtacgtagcagcgaagtgggtagaataagtcgcccgagtttaatgggcgaagaggagtatctaaacgattccttgctcagaccggcaagagaaaaaaatttcccaaacaatggaatagaaagtttggtggataaaatgagtagatggaagacttatgctcaggatcacagagacgagcctgggatcatggggattacaagtagagcgagccgtagacgccagcgccatgacagacagaggggtcttgtgtgggacgatgaggattcggccgatgatagcagcgtgctggacttgggtgggagaggaaggggcaacccgtttgctcatttgcgccctcgcttgggtggtatgttgtaaaaaaaaataaaaaaaaaactcaccaaggccatggcgacgagcgtacgttcgttcttctttattatctgtgtctagtataatgaggcgagtcgtgctaggcggagcggtggtgtatccggagggtcctcctccttcgtacgagagcgtgatgcagcagcagcaggcgacggcggtgatgcaatccccactggaggctccctttgtgcctccgcgatacctggcacctacggagggcagaaacagcattcgttattcggaactggcacctcagtacgataccaccaggttgtatctggtggacaacaagtcggcggacattgcttctctgaactatcagaatgaccacagcaacttcttgaccacggtggtgcaaaacaatgactttacccctacggaagccagcacccagaccattaactttgatgaacgatcgcggtggggcggtcagctaaagaccatcatgcatactaacatgccaaacgtgaacgagtatatgtttagtaacaagttcaaagcgcgtgtgatggtgtccagaaaacctcccgacggtgctgcagttggggatacttatgatcacaagcaggatattttgaaatatgagtggttcgagtttactttgccagaaggcaacttttcagttactatgactattgatttgatgaacaatgccatcatagataattacttgaaagtgggtagacagaatggagtgcttgaaagtgacattggtgttaagttcgacaccaggaacttcaagctgggatgggatcccgaaaccaagttgatcatgcctggagtgtatacgtatgaagccttccatcctgacattgtcttactgcctggctgcggagtggattttaccgagagtcgtttgagcaaccttcttggtatcagaaaaaaacagccatttcaagagggttttaagattttgtatgaagatttagaaggtggtaatattccggccctcttggatgtagatgcctatgagaacagtaagaaagaacaaaaagccaaaatagaagctgctacagctgctgcagaagctaaggcaaacatagttgccagcgactctacaagggttgctaacgctggagaggtcagaggagacaattttgcgccaacacctgttccgactgcagaatcattattggccgatgtgtctgaaggaacggacgtgaaactcactattcaacctgtagaaaaagatagtaagaatagaagctataatgtgttggaagacaaaatcaacacagcctatcgcagttggtatctttcgtacaattatggcgatcccgaaaaaggagtgcgttcctggacattgctcaccacctcagatgtcacctgcggagcagagcaggtctactggtcgcttccagacatgatgaaggatcctgtcactttccgctccactagacaagtcagtaactaccctgtggtgggtgcagagcttatgcccgtcttctcaaagagcttctacaacgaacaagctgtgtactcccagcagctccgccagtccacctcgcttacgcacgtcttcaaccgctttcctgagaaccagattttaatccgtccgccggcgcccaccattaccaccgtcagtgaaaacgttcctgctctcacagatcacgggaccctgccgttgcgcagcagtatccggggagtccaacgtgtgaccgttactgacgccagacgccgcacctgtccctacgtgtacaaggcactgggcatagtcgcaccgcgcgtcctttcaagccgcactttctaaaaaaaaaaaaaatgtccattcttatctcgcccagtaataacaccggttggggtctgcgcgctccaagcaagatgtacggaggcgcacgcaaacgttctacccaacatcctgtccgtgttcgcggacattttcgcgctccatggggcgccctcaagggccgcactcgcgttcgaaccaccgtcgatgatgtaatcgatcaggtggttgccgacgcccgtaattatactcctactgcgcctacatctactgtggatgcagttattgacagtgtagtggctgacgctcgcaactatgctcgacgtaagagccggcgaaggcgcattgccagacgccaccgagctaccactgccatgcgagccgcaagagctctgctacgaagagctagacgcgtggggcgaagagccatgcttagggcggccagacgtgcagcttcgggcgccagcgccggcaggtcccgcaggcaagcagccgctgtcgcagcggcgactattgccgacatggcccaatcgcgaagaggcaatgtatactgggtgcgtgacgctgccaccggtcaacgtgtacccgtgcgcacccgtccccctcgcacttagaagatactgagcagtctccgatgttgtgtcccagcggcgaggatgtccaagcgcaaatacaaggaagaaatgctgcaggttatcgcacctgaagtctacggccaaccgttgaaggatgaaaaaaaaccccgcaaaatcaagcgggttaaaaaggacaaaaaagaagaggaagatggcgatgatgggctggcggagtttgtgcgcgagtttgccccacggcgacgcgtgcaatggcgtgggcgcaaagttcgacatgtgttgagacctggaacttcggtggtctttacacccggcgagcgttcaagcgctacttttaagcgttcctatgatgaggtgtacggggatgatgatattcttgagcaggcggctgaccgattaggcgagtttgcttatggcaagcgtagtagaataacttccaaggatgagacagtgtcgatacccttggatcatggaaatcccacccctagtcttaaaccggtcactttgcagcaagtgttacccgtaactccgcgaacaggtgttaaacgcgaaggtgaagatttgtatcccactatgcaactgatggtacccaaacgccagaagttggaggacgttttggagaaagtaaaagtggatccagatattcaacctgaggttaaagtgagacccattaagcaggtagcgcctggtctgggggtacaaactgtagacattaagattcccactgaaagtatggaagtgcaaactgaacccgcaaagcctactgccacctccactgaagtgcaaacggatccatggatgcccatgcctattacaactgacgccgccggtcccactcgaagatcccgacgaaagtacggtccagcaagtctgttgatgcccaattatgttgtacacccatctattattcctactcctggttaccgaggcactcgctactatcgcagccgaaacagtacctcccgccgtcgccgcaagacacctgcaaatcgcagtcgtcgccgtagacgcacaagcaaaccgactcccggcgccctggtgcggcaagtgtaccgcaatggtagtgcggaacctttgacactgccgcgtgcgcgttaccatccgagtatcatcacttaatcaatgttgccgctgcctccttgcagatatggccctcacttgtcgccttcgcgttcccatcactggttaccgaggaagaaactcgcgccgtagaagagggatgttgggacgcggaatgcgacgctacaggcgacggcgtgctatccgcaagcaattgcggggtggttttttaccagccttaattccaattatcgctgctgcaattggcgcgataccaggcatagcttccgtggcggttcaggcctcgcaacgacattgacattggaaaaaaacgtataaataaaaaaaaaaaaatacaatggactctgacactcctggtcctgtgactatgttttcttagagatggaagacatcaatttttcatccttggctccgcgacacggcacgaagccgtacatgggcacctggagcgacatcggcacgagccaactgaacgggggcgccttcaattggagcagtatctggagcgggcttaaaaattttggctcaaccataaaaacatacgggaacaaagcttggaacagcagtacaggacaggcgcttagaaataaacttaaagaccagaacttccaacaaaaagtagtcgatgggatagcttccggcatcaatggagtggtagatttggctaaccaggctgtgcagaaaaagataaacagtcgtttggacccgccgccagcaaccccaggtgaaatgcaagtggaggaagaaattcctccgccagaaaaacgaggcgacaagcgtccgcgtcccgatttggaagagacgctggtgacgcgcgtagatgaaccgccttcttatgaggaagcaacgaagcttggaatgcccaccactagaccgatagccccaatggccaccggggtgatgaaaccttctcagttgcatcgacccgtcaccttggatttgccccctccccctgctgctactgctgtacccgcttctaagcctgtcgctgccccgaaaccagtcgccgtagccaggtcacgtcccgggggcgctcctcgtccaaatgcgcactggcaaaatactctgaacagcatcgtgggtctaggcgtgcaaagtgtaaaacgccgtcgctgcttttaattaaatatggagtagcgcttaacttgcctatctgtgtatatgtgtcattacacgccgtcacagcagcagaggaaaaaaggaagaggtcgtgcgtcgacgctgagttactttcaagatggccaccccatcgatgctgccccaatgggcatacatgcacatcgccggacaggatgcttcggagtacctgagtccgggtctggtgcagttcgcccgcgccacagacacctacttcaatctgggaaataagtttagaaatcccaccgtagcgccgacccacgatgtgaccaccgaccgtagccagcggctcatgttgcgcttcgtgcccgttgaccgggaggacaatacatactcttacaaagtgcggtacaccctggccgtgggcgacaacagagtgctggatatggccagcacgttctttgacattaggggtgtgttggacagaggtcccagtttcaaaccctattctggtacggcttacaactccctggctcctaaaggcgctccaaatacatctcagtggattgcagaaggtgtaaaaaatacaactggtgaggaacacgtaacagaagaggaaaccaatactactacttacacttttggcaatgctcctgtaaaagctgaagctgaaattacaaaagaaggactcccagtaggtttggaagtttcagatgaagaaagtaaaccgatttatgctgataaaacatatcagccagaacctcagctgggagatgaaacttggactgaccttgatggaaaaaccgaaaagtatggaggcagggctctcaaacccgatactaagatgaaaccatgctacgggtcctttgccaaacctactaatgtgaaaggcggtcaggcaaaacaaaaaacaacggagcagccaaatcagaaagtcgaatatgatatcgacatggagttttttgatgcggcatcgcagaaaacaaacttaagtcctaaaattgtcatgtatgcagaaaatgtaaatttggaaactccagacactcatgtagtgtacaaacctggaacagaagacacaagttccgaagctaatttgggacaacaatctatgcccaacagacccaactacattggcttcagagataactttattggacttatgtactataacagtactggtaacatgggggtgctggctggtcaagcgtctcagttaaatgcagtggttgacttgcaggacagaaacacagaactttcttaccaactcttgcttgactctctgggcgacagaaccagatactttagcatgtggaatcaggctgtggacagttatgatcctgatgtacgtgttattgaaaatcatggtgtggaagatgaacttcccaactactgttttccactggacggcataggtgttccaacaaccagttacaaatcaatagttccaaatggagacaatgcgcctaattggaaggaacctgaagtaaatggaacaagtgagatcggacagggtaatttgtttgccatggaaattaaccttcaagccaatctatggcgaagtttcctttattccaatgtggctctatatctcccagactcgtacaaatacaccccgtccaatgtcactcttccagaaaacaaaaacacctacgactacatgaacgggcgggtggtgccgccatctctagtagacacctatgtgaacattggtgccaggtggtctctggatgccatggacaatgtcaacccattcaaccaccaccgtaacgctggcttgcgttaccgatccatgcttctgggtaacggacgttatgtgcctttccacatacaagtgcctcaaaaattcttcgctgttaaaaacctgctgcttctcccaggctcctacacttatgagtggaactttaggaaggatgtgaacatggttctacagagttccctcggtaacgacctgcgggtagatggcgccagcatcagtttcacgagcatcaacctctatgctacttttttccccatggctcacaacaccgcttccacccttgaagccatgctgcggaatgacaccaatgatcagtcattcaacgactacctatctgcagctaacatgctctaccccattcctgccaatgcaaccaatattcccatttccattccttctcgcaactgggcggctttcagaggctggtcatttaccagactgaaaaccaaagaaactccctctttggggtctggatttgacccctactttgtctattctggttctattccctacctggatggtaccttctacctgaaccacacttttaagaaggtttccatcatgtttgactcttcagtgagctggcctggaaatgacaggttactatctcctaacgaatttgaaataaagcgcactgtggatggcgaaggctacaacgtagcccaatgcaacatgaccaaagactggttcttggtacagatgctcgccaactacaacatcggctatcagggcttctacattccagaaggatacaaagatcgcatgtattcatttttcagaaacttccagcccatgagcaggcaggtggttgatgaggtcaattacaaagacttcaaggccgtcgccataccctaccaacacaacaactctggctttgtgggttacatggctccgaccatgcgccaaggtcaaccctatcccgctaactatccctatccactcattggaacaactgccgtaaatagtgttacgcagaaaaagttcttgtgtgacagaaccatgtggcgcataccgttctcgagcaacttcatgtctatgggggcccttacagacttgggacagaatatgctctatgccaactcagctcatgctctggacatgacctttgaggtggatcccatggatgagcccaccctgctttatcttctcttcgaagttttcgacgtggtcagagtgcatcagccacaccgcggcatcatcgaggcagtctacctgcgtacaccgttctcggccggtaacgctaccacgtaagaagcttcttgcttcttgcaaatagcagctgcaaccatggcctgcggatcccaaaacggctccagcgagcaagagctcagagccattgtccaagacctgggttgcggaccctattttttgggaacctacgataagcgcttcccggggttcatggcccccgataagctcgcctgtgccattgtaaatacggccggacgtgagacggggggagagcactggttggctttcggttggaacccacgttctaacacctgctacctttttgatccttttggattctcggatgatcgtctcaaacagatttaccagtttgaatatgagggtctcctgcgccgcagcgctcttgctaccaaggaccgctgtattacgctggaaaaatctacccagaccgtgcagggtccccgttctgccgcctgcggacttttctgctgcatgttccttcacgcctttgtgcactggcctgaccgtcccatggacggaaaccccaccatgaaattgctaactggagtgccaaacaacatgcttcattctcctaaagtccagcccaccctgtgtgacaatcaaaaagcactctaccattttcttaatacccattcgccttattttcgctcccatcgtacacacatcgaaagggccactgcgttcgaccgtatggatgttcaataatgactcatgtaaacaacgtgttcaataaacatcactttatttttttacatgtatcaaggctctgcattacttatttatttacaagtcgaatgggttctgacgagaatcagaatgacccgcaggcagtgatacgttgcggaactgatacttgggttgccacttgaattcgggaatcaccaacttgggaaccggtatatcgggcaggatgtcactccacagctttctggtcagctgcaaagctccaagcaggtcaggagccgaaatcttgaaatcacaattaggaccagtgctttgagcgcgagagttgcggtacaccggattgcagcactgaaacaccatcagcgacggatgtctcacgcttgccagcacggtgggatctgcaatcatgcccacatccagatcttcagcattggcaatgctgaacggggtcatcttgcaggtctgcctacccatggcgggcacccaattaggcttgtggttgcaatcgcagtgcagggggatcagtatcatcttggcctgatcctgtctgattcctggatacacggctctcatgaaagcatcatattgcttgaaagcctgctgggctttactaccctcggtataaaacatcccgcaggacctgctcgaaaactggttagctgcacagccggcatcattcacacagcagcgggcgtcattgttagctatttgcaccacacttctgccccagcggttttgggtgattttggttcgctcgggattctcctttaaggctcgttgtccgttctcgctggccacatccatctcgataatctgctccttctgaatcataatattgccatgcaggcacttcagcttgccctcataatcattgcagccatgaggccacaacgcacagcctgtacattcccaattatggtgggcgatctgagaaaaagaatgtatcattccctgcagaaatcttcccatcatcgtgctcagtgtcttgtgactagtgaaagttaactggatgcctcggtgctcctcgtttacgtactggtgacagatgcgcttgtattgttcgtgttgctcaggcattagtttaaaagaggttctaagttcgttatccagcctgtacttctccatcagcagacacatcacttccatgcctttctcccaagcagacaccaggggcaagctaatcggattcttaacagtgcaggcagcagctcctttagccagagggtcatctttagcgatcttctcaatgcttcttttgccatccttctcaacgatgcgcacgggcgggtagctgaaacccactgctacaagttgcgcctcttctctttcttcttcgctgtcttgactgatgtcttgcatggggatatgtttggtcttccttggcttctttttggggggtatcggaggaggaggactgtcgctccgttccggagacagggaggattgtgacgtttcgctcaccattaccaactgactgtcggtagaagaacctgaccccacacggcgacaggtgtttctcttcgggggcagaggtggaggcgattgcgaagggctgcggtccgacctggaaggcggatgactggcagaaccccttccgcgttcgggggtgtgctccctgtggcggtcgcttaactgatttccttcgcggctggccattgtgttctcctaggcagagaaacaacagacatggaaactcagccattgctgtcaacatcgccacgagtgccatcacatctcgtcctcagcgacgaggaaaaggagcagagcttaagcattccaccgcccagtcctgccaccacctctaccctagaagataaggaggtcgacgcatctcatgacatgcagaataaaaaagcgaaagagtctgagacagacatcgagcaagacccgggctatgtgacaccggtggaacacgaggaagagttgaaacgctttctagagagagaggatgaaaactgcccaaaacaacgagcagataactatcaccaagatgctggaaatagggatcagaacaccgactacctcatagggcttgacggggaagacgcgctccttaaacatctagcaagacagtcgctcatagtcaaggatgcattattggacagaactgaagtgcccatcagtgtggaagagctcagccgcgcctacgagcttaacctcttttcacctcgtactccccccaaacgtcagccaaacggcacctgcgagccaaatcctcgcttaaacttttatccagcttttgctgtgccagaagtactggctacctatcacatcttttttaaaaatcaaaaaattccagtctcctgccgcgctaatcgcacccgcgccgatgccctactcaatctgggacctggttcacgcttacctgatatagcttccttggaagaggttccaaagatcttcgagggtctgggcaataatgagactcgggccgcaaatgctctgcaaaagggagaaaatggcatggatgagcatcacagcgttctggtggaattggaaggcgataatgccagactcgcagtactcaagcgaagcatcgaggtcacacacttcgcatatcccgctgtcaacctgccccctaaagtcatgacggcggtcatggaccagttactcattaagcgcgcaagtcccctttcagaagacatgcatgacccagatgcctgtgatgagggtaaaccagtggtcagtgatgagcagctaacccgatggctgggcaccgactctcccagggatttggaagagcgtcgcaagcttatgatggccgtggtgctggttaccgtagaactagagtgtctccgacgtttctttaccgattcagaaaccttgcgcaaactcgaagagaatctgcactacacttttagacacggctttgtgcggcaggcatgcaagatatctaacgtggaactcaccaacctggtttcctacatgggtattctgcatgagaatcgcctaggacaaagcgtgctgcacagcaccctgaagggggaagcccgccgtgattacatccgcgattgtgtctatctgtacctgtgccacacgtggcaaaccggcatgggtgtatggcagcaatgtttagaagaacagaacttgaaagagcttgacaagctcttacagaaatctcttaaggttctgtggacagggttcgacgagcgcaccgtcgcttccgacctggcagacctcatcttcccagagcgtctcagggttactttgcgaaacggattgcctgactttatgagccagagcatgcttaacaattttcgctctttcatcctggaacgctccggtatcctgcccgccacctgctgcgcactgccctccgactttgtgcctctcacctaccgcgagtgccccccgccgctatggagtcactgctacctgttccgtctggccaactatctctcctaccactcggatgtgatcgaggatgtgagcggagacggcttgctggagtgtcactgccgctgcaatctgtgcacgccccaccggtccctagcttgcaacccccagttgatgagcgaaacccagataataggcacctttgaattgcaaggccccagcagccaaggcgatgggtcttctcctgggcaaagtttaaaactgaccccgggactgtggacctccgcctacttgcgcaagtttgctccggaagattaccacccctatgaaatcaagttctatgaggaccaatcacagcctccaaaggccgaactttcggcctgcgtcatcacccagggggcaattctggcccaattgcaagccatccaaaaatcccgccaagaatttctactgaaaaagggtaagggggtctaccttgacccccagaccggcgaggaactcaacacaaggttccctcaggatgtcccaacgacgagaaaacaagaagttgaaggtgcagccgccgcccccagaagatatggaggaagattgggacagtcaggcagaggaggcggaggaggacagtctggaggacagtctggaggaagacagtttggaggaggaaaacgaggaggcagaggaggtggaagaagtaaccgccgacaaacagttatcctcggctgcggagacaagcaacagcgctaccatctccgctccgagtcgaggaacccggcggcgtcccagcagtagatgggacgagaccggacgcttcccgaacccaaccagcgcttccaagaccggtaagaaggatcggcagggatacaagtcctggcgggggcataagaatgccatcatctcctgcttgcatgagtgcgggggcaacatatccttcacgcggcgctacttgctattccaccatggggtgaactttccgcgcaatgttttgcattactaccgtcacctccacagcccctactatagccagcaaatcccggcagtctcgacagataaagacagcggcggcgacctccaacagaaaaccagcagcggcagttagaaaatacacaacaagtgcagcaacaggaggattaaagattacagccaacgagccagcgcaaacccgagagttaagaaatcggatctttccaaccctgtatgccatcttccagcagagtcggggtcaagagcaggaactgaaaataaaaaaccgatctctgcgttcgctcaccagaagttgtttgtatcacaagagcgaagatcaacttcagcgcactctcgaggacgccgaggctctcttcaacaagtactgcgcgctgactcttaaagagtaggcagcgaccgcgcttattcaaaaaaggcgggaattacatcatcctcgacatgagtaaagaaattcccacgccttacatgtggagttatcaaccccaaatgggattggcggcaggcgcctcccaggactactccacccgcatgaattggctcagcgccgggccttctatgatttctcgagttaatgatatacgcgcctaccgaaaccaaatacttttggaacagtcagctcttaccaccacgccccgccaacaccttaatcccagaaattggcccgccgccctagtgtaccaggaaagtcccgctcccaccactgtattacttcctcgagacgcccaggccgaagtccaaatgactaatgcaggtgcgcagttagctggcggctccaccctatgtcgtcacaggcctcggcataatataaaacgcctgatgatcagaggccgaggtatccagctcaacgacgagtcggtgagctctccgcttggtctacgaccagacggaatctttcagattgccggctgcgggagatcttccttcacccctcgtcaggctgttctgactttggaaagttcgtcttcgcaaccccgctcgggcggaatcgggaccgttcaatttgtggaggagtttactccctctgtctacttcaaccccttctccggatctcctgggcattacccggacgagttcataccgaacttcgacgcgattagcgagtcagtggacggctacgattgatgtctggtgacgcggctgagctatctcggctgcgacatctagaccactgccgccgctttcgctgctttgcccgggaactcattgagttcatctacttcgaactccccaaggatcaccctcaaggtccggcccacggagtgcggatttctatcgaaggcaaaatagactctcgcctgcaacgaattttctcccagcggcccgtgctgatcgagcgagaccagggaaacaccacggtttccatctactgcatttgtaatcaccccggattgcatgaaagcctttgctgtcttatgtgtactgagtttaataaaaactgaattaagactctcctacggactgccgcttcttcaacccggattttacaaccagaagaacgaaacttttcctgtcgtccaggactctgttaacttcacctttcctactcacaaactagaagctcaacgactacaccgcttttccagaagcattttccctactaatactactttcaaaaccggaggtgagctccaaggtcttcctacagaaaacccttgggtggaagcgggccttgtagtgctaggaattcttgcgggtgggcttgtgattattctttgctacctatacacaccttgcttcactttcttagtggtgttgtggtattggtttaaaaaatggggcccatactagtcttgcttgttttactttcgcttttggaaccgggttctgccaattacgatccatgtctagacttcgacccagaaaactgcacacttacttttgcacccgacacaagccgcatctgtggagttcatcgcctctcttacgaacttggcccccaacgacaaaaatttacctgcatggtgggaatcaaccccatagttatcacccagcaaagtggagatactaagggttgcattcactgctcctgcgattccatcgagtgcacctacaccctgctgaagaccctatgcggcctaagagacctgctaccaatgaattaaaaaatgattaataaaaaatcacttacttgaaatcagcaataaggtctctgttgaaattttctcccagcagcacctcacttccctcttcccaactctggtattctaaaccccgttcagcggcatactttctccatactttaaaggggatgtcaaattttagctcctctcctgtacccacaatcttcatgtctttcttcccagatgaccaagagagtccggctcagtgactccttcaaccctgtctacccctatgaagatgaaagcacctcccaacacccctttataaacccagggtttatttccccaaatggcttcacacaaagcccaaacggagttcttactttaaaatgtttaaccccactaacaaccacaggcggatctctacagctaaaagtgggagggggacttacagtggatgacaccaacggttttttgaaagaaaacataagtgccaccacaccactcgttaagactggtcactctataggtttaccactaggagccggattgggaacgaatgaaaataaactttgtatcaaattaggacaaggacttacattcaattcaaacaacatttgcattgatgacaatattaacaccttatggacaggagtcaaccccaccgaagccaactgtcaaatcatgaactccagtgaatctaatgattgcaaattaattctaacactagttaaaactggagcactagtcactgcatttgtttatgttataggagtatctaacaattttaatatgctaactacacacagaaatataaattttactgcagagctgtttttcgattctactggtaatttactaactagactctcatccctcaaaactccacttaatcataaatcaggacaaaacatggctactggtgccattactaatgctaaaggtttcatgcccagcacgactgcctatcctttcaatgataattctagagaaaaagaaaactacatttacggaacttgttactacacagctagtgatcgcactgcttttcccattgacatatctgtcatgcttaaccgaagagcaataaatgacgagacatcatattgtattcgtataacttggtcctggaacacaggagatgccccagaggtgcaaacctctgctacaaccctagtcacctccccatttaccttttactacatcagagaagacgactgacaaataaagtttgcgatcgccaggcccaccatggccccgcggcgggcgcgcggctgccggaccctcggtctcccggcgctgctactgctgctgctgctccggccgccggcgacgcggggcatcacgtgccctccccccatgtccgtggaacacgcagacatctgggtcaagagctacagcttgtactccagggagcggtacatttgtaactctggtttcaagcgtaaagccggcacgtccagcctgacggagtgcgtgttgaacaaggccacgaatgtcgcccactggacaacccccagtctcaaatgcattagagacgaacaaaaactcatctcagaagaggatctggctgtgggccaggacacgcaggaggtcatcgtggtgccacactccttgccctttaaggtggtggtgatctcagccatcctggccctggtggtgctcaccatcatctcccttatcatcctcatcatgctttggcagaagaagccacgttaagctagcttgactgactgagatacagcgtaccttcagctcacagacatgataagatacattgatgagtttggacaaaccacaactagaatgcagtgaaaaaaatgctttatttgtgaaatttgtgatgctattgctttatttgtaaccattataagctgcaataaacaagttaacaacaacaattgcattcattttatgtttcaggttcagggggaggtgtgggaggttttttaaagcaagtaaaacctctacaaatgtggtagtcgtcagctatcctgcaggaacttgtttatttgaaaatcaattcacaaaatccgagtagttattttgcctcccccttcccatttaacagaatacaccaatctctccccacgcacagctttaaacatttggataccattagatatagacatggttttagattccacattccaaacagtttcagagcgagccaatctggggtcagtgatagataaaaatccatcgggatagtcttttaaagcgctttcacagtccaactgctgcggatgcgactccggagtctggatcacggtcatctggaagaagaacgatgggaatcataatccgaaaacggtatcggacgattgtgtctcatcaaacccacaagcagccgctgtctgcgtcgctccgtgcgactgctgtttatgggatcagggtccacagtgtcctgaagcatgattttaatagcccttaacatcaactttctggtgcgatgcgcgcagcaacgcattctgatttcactcaaatctttgcagtaggtacaacacattattacaatattgtttaataaaccataattaaaagcgctccagccaaaactcatatctgatataatcgcccctgcatgaccatcataccaaagtttaatataaattaaatgacgttccctcaaaaacacactacccacatacatgatctcttttggcatgtgcatattaacaatctgtctgtaccatggacaacgttggttaatcatgcaacccaatataaccttccggaaccacactgccaacaccgctcccccagccatgcattgaagtgaaccctgctgattacaatgacaatgaagaacccaattctctcgaccgtgaatcacttgagaatgaaaaatatctatagtggcacaacatagacataaatgcatgcatcttctcataatttttaactcctcaggatttagaaacatatcccagggaataggaagctcttgcagaacagtaaagctggcagaacaaggaagaccacgaacacaacttacactatgcatagtcatagtatcacaatctggcaacagcgggtggtcttcagtcatagaagctcgggtttcattttcctcacaacgtggtaactgggctctggtgtaagggtgatgtctggcgcatgatgtcgagcgtgcgcgcaaccttgtcataatggagttgcttcctgacattctcgtattttgtatagcaaaacgcggccctggcagaacacactcttcttcgccttctatcctgccgcttagcgtgttccgtgtgatagttcaagtacaaccacactcttaagttggtcaaaagaatgctggcttcagttgtaatcaaaactccatcgcatctaatcgttctgaggaaatcatccaagcaatgcaactggattgtgtttcaagcaggagaggagagggaagagacggaagaaccatgttaatttttattccaaacgatctcgcagtacttcaaattgtagatcgcgcagatggcatctctcgcccccactgtgttggtgaaaaagcacagctagatcaaaagaaatgcgattttcaaggtgctcaacggtggcttccagcaaagcctccacgcgcacatccaagaacaaaagaataccaaaagaaggagcattttctaactcctcaatcatcatattacattcctgcaccattcccagataattttcagctttccagccttgaattattcgtgtcagttcttgtggtaaatccaatccacacattacaaacaggtcccggagggcgccctccaccaccattcttaaacacaccctcataatgacaaaatatcttgctcctgtgtcacctgtagcgaattgagaatggcaacatcaattgacatgcccttggctctaagttcttctttaagttctagttgtaaaaactctctcatattatcaccaaactgcttagccagaagccccccgggaacaagagcaggggacgctacagtgcagtacaagcgcagacctccccaattggctccagcaaaaacaagattggaataagcatattgggaaccgccagtaatatcatcgaagttgctggaaatataatcaggcagagtttcttgtaaaaattgaataaaagaaaaatttgccaaaaaaacattcaaaacctctgggatgcaaatgcaataggttaccgcgctgcgctccaacattgttagttttgaattagtctgcaaaaataaaaaaaaaaacaagcgtcatatcatagtagcctgacgaacagatggataaatcagtctttccatcacaagacaagccacagggtctccagctcgaccctcgtaaaacctgtcatcatgattaaacaacagcaccgaaagttcctcgcggtgaccagcatgaataattcttgatgaagcatacaatccagacatgttagcatcagttaacgagaaaaaacagccaacatagcctttgggtataattatgcttaatcgtaagtatagcaaagccacccctcgcggatacaaagtaaaaggcacaggagaataaaaaatataattatttctctgctgctgttcaggcaacgtcgcccccggtccctctaaatacacatacaaagcctcatcagccatggcttaccagacaaagtacagcgggcacacaaagcacaagctctaaagtgactctccaacctctccacaatatatatatacacaagccctaaactgacgtaatgggagtaaagtgtaaaaaatcccgccaaacccaacacacaccccgaaactgcgtcaccagggaaaagtacagtttcacttccgcaatcccaacaggcgtaacttcctctttctcacggtacgtgatatcccactaacttgcaacgtcattttcccacggtcgcaccgccccttttagccgttaaccccacagccaatcaccacacgatccacactttttaaaatcacctcatttacatattggcaccattccatctataaggtatattatatagataga

SEQ ID NO: 93 - DNA, 36253 bp, Artificial Sequence
  Genome sequence of NG-750 virus
tctatctatataatataccttatagatggaatggtgccaatatgtaaatgaggtgattttaaaaagtgtggatcgtgtggtgattggctgtggggttaacggctaaaaggggcggtgcgaccgtgggaaaatgacgttttgtgggggtggagtttttttgcaagttgtcgcgggaaatgtgacgcataaaaaggcttttttctcacggaactacttagttttcccacggtatttaacaggaaatgaggtagttttgaccggatgcaagtgaaaattgttgattttcgcgcgaaaactgaatgaggaagtgtttttctgaataatgtggtatttatggcagggtggagtatttgttcagggccaggtagactttgacccattacgtggaggtttcgattaccgtgttttttacctgaatttccgcgtaccgtgtcaaagtcttctgtttttacgtaggtgtcagctgatcgctagggtatttatacctcagggtttgtgtcaagaggccactcttgagtgccagcgagaagagttttctcctctgcgccggcagtttaataataaaaaaatgagagatttgcgatttctgcctcaggaaataatctctgctgagactggaaatgaaatattggagcttgtggtgcacgccctgatgggagacgatccggagccacctgtgcagctttttgagcctcctacgcttcaggaactgtatgatttagaggtagagggatcggaggattctaatgaggaagctgtaaatggcttttttaccgattctatgcttttagctgctaatgaagggttagaattagatccgcctttggacacttttgatactccaggggtaattgtggaaagcggtacaggtgtaagaaaattacctgatttgagttccgtggactgtgatttgcactgctatgaagacgggtttcctccgagtgatgaggaggaccatgaaaaggagcagtccatgcagactgcagcgggtgagggagtgaaggctgccaatgttggttttcagttggattgcccggagcttcctggacatggctgtaagtcttgtgaatttcacaggaaaaatactggagtaaaggaactgttatgttcgctttgttatatgagaacgcactgccactttatttacagtaagtgtgtttaagttaaaatttaaaggaatatgctgtttttcacatgtatattgagtgtgagttttgtgcttcttattataggtcctgtgtctgatgctgatgaatcaccatctcctgattctactacctcacctcctgagattcaagcacctgttcctgtggacgtgcgcaagcccattcctgtgaagcttaagcctgggaaacgtccagcagtggaaaaacttgaggacttgttacagggtggggacggacctttggacttgagtacacggaaacgtccaagacaataagtgttccatatccgtgtttacttaaggtgacgtcaatatttgtgtgacagtgcaatgtaataaaaatatgttaactgttcactggtttttattgctttttgggcggggactcaggtatataagtagaagcagacctgtgtggttagctcataggagctggctttcatccatggaggtttgggccattttggaagaccttaggaagactaggcaactgttagagaacgcttcggacggagtctccggtttttggagattctggttcgctagtgaattagctagggtagtttttaggataaaacaggactataaacaagaatttgaaaagttgttggtagattgcccaggactttttgaagctcttaatttgggccatcaggttcactttaaagaaaaagttttatcagttttagacttttcaaccccaggtagaactgctgctgctgtggcttttcttacttttatattagataaatggatcccgcagactcatttcagcaggggatacgttttggatttcatagccacagcattgtggagaacatggaaggttcgcaagatgaggacaatcttaggttactggccagtgcagcctttgggtgtagcgggaatcctgaggcatccaccggtcatgccagcggttctggaggaggaacagcaagaggacaacccgagagccggcctggaccctccagtggaggaggcggagtagctgacttgtctcctgaactgcaacgggtgcttactggatctacgtccactggacgggataggggcgttaagagggagagggcatctagtggtactgatgctagatctgagttggctttaagtttaatgagtcgcagacgtcctgaaaccatttggtggcatgaggttcagaaagagggaagggatgaagtttctgtattgcaggagaaatattcactggaacaggtgaaaacatgttggttggagcctgaggatgattgggaggtggccattaaaaattatgccaagatagctttgaggcctgataaacagtataagattactagacggattaatatccggaatgcttgttacatatctggaaatggggctgaggtggtaatagatactcaagacaaggcagttattagatgctgcatgatggatatgtggcctggggtagtcggtatggaagcagtaacttttgtaaatgttaagtttaggggagatggttataatggaatagtgtttatggccaataccaaacttatattgcatggttgtagcttttttggtttcaacaatacctgtgtagatgcctggggacaggttagtgtacggggatgtagtttctatgcgtgttggattgccacagctggcagaaccaagagtcaattgtctctgaagaaatgcatatttcaaagatgtaacctgggcattctgaatgaaggcgaagcaagggtccgccactgcgcttctacagatactggatgttttattttgattaagggaaatgccagcgtaaagcataacatgatttgcggtgcttccgatgagaggccttatcaaatgctcacttgtgctggtgggcattgtaatatgctggctactgtgcatattgtttcccatcaacgcaaaaaatggcctgtttttgatcacaatgtgatgacgaagtgtaccatgcatgcaggtgggcgtagaggaatgtttatgccttaccagtgtaacatgaatcatgtgaaagtgttgttggaaccagatgccttttccagaatgagcctaacaggaatttttgacatgaacatgcaaatctggaagatcctgaggtatgatgatacgagatcgagggtacgcgcatgcgaatgcggaggcaagcatgccaggttccagccggtgtgtgtagatgtgactgaagatctcagaccggatcatttggttattgcccgcactggagcagagttcggatccagtggagaagaaactgactaaggtgagtattgggaaaactttggggtgggattttcagatggacagattgagtaaaaatttgttttttctgtcttgcagctgtcatgagtggaaacgcttcttttaaggggggagtcttcagcccttatctgacagggcgtctcccatcctgggcaggagttcgtcagaatgttatgggatctactgtggatggaagacccgtccaacccgccaattcttcaacgctgacctatgctactttaagttcttcacctttggacgcagctgcagctgccgccgccgcttctgttgccgctaacactgtgcttggaatgggttactatggaagcatcatggctaattccacttcctctaataacccttctaccctgactcaggacaagttacttgtccttttggcccagctggaggctttgacccaacgtctgggtgaactttctcagcaggtggtcgagttgcgagtacaaactgagtctgctgtcggcacggcaaagtctaaataaaaaaatcccagaatcaatgaataaataaacaagcttgttgttgatttaaaatcaagtgtttttatttcatttttcgcgcacggtatgccctagaccaccgatctctatcattgagaactcggtggattttttccaggatcctatagaggtgggattgaatgtttagatacatgggcattaggccgtctttggggtggagatagctccattgaagggattcatgctccggggtagtgttgtaaatcacccagtcataacaaggtcgcagtgcatggtgttgcacaatatcttttagaagtaggctgattgccacagataagcccttggtgtaggtgtttacaaaccggttgagctgggatgggtgcattcggggtgaaattatgtgcattttggattggatttttaagttggcaatattgccgccaagatcccgtcttgggttcatgttatgaaggaccaccaagacggtgtatccggtacatttaggaaatttatcgtgcagcttggatggaaaagcgtggaaaaatttggagacacccttgtgtcctccaagattttccatgcactcatccatgataatagcaatggggccgtgggcagcggcgcgggcaaacacgttccgtgggtctgacacatcatagttatgttcctgagttaaatcatcataagccattttaatgaatttggggcggagagtaccagattggggtatgaatgttccttcgggccccggagcatagttcccctcacagatttgcatttcccaagctttcagttccgagggtggaatcatgtccacctggggggctatgaaaaacaccgtttctggggcgggggtgattaattgtgatgatagcaaatttctgagcaattgagatttgccacatccggtggggccataaatgattccgattacgggttgcaggtggtagtttagggaacggcaactgccgtcttctcgaagcaagggggccacctcgttcatcatttcccttacatgcatattttcccgcaccaaatccattaggaggcgctctcctcctagtgatagaagttcttgtagtgaggaaaagtttttcagcggtttcagaccgtcagccatgggcattttggagagagtttgctgcaaaagttctagtctgttccacagttcagtgatgtgttctatggcatctcgatccagcagacctcctcgtttcgcgggtttggacggctcctggaatagggtatgagacgatgggcgtccagcgctgccagggttcggtccttccagggtctcagtgttcgagtcagggttgtttccgtcacagtgaaggggtgtgcgcctgcttgggcgcttgccagggtgcgcttcagactcatcctgctggtcgaaaacttctgtcgcttggcgccctgtatgtcggccaagtagcagtttaccatgagttcgtagttgagcgcctcggctgcgtggcctttggcgcggagcttacctttggaagttttcttgcataccgggcagtataggcatttcagcgcatacaacttgggcgcaaggaaaacggattctggggagtatgcatctgcgccgcaggaggcgcaaacagtttcacattccaccagccaggttaaatccggttcattggggtcaaaaacaagttttccgccatattttttgatgcgtttcttacctttggtctccatgagttcgtgtcctcgttgagtgacaaacaggctgtccgtgtccccgtagactgattttacaggcctcttctccagtggagtgcctcggtcttcttcgtacaggaactctgaccactctgatacaaaggcgcgcgtccaggccagcacaaaggaggctatgtgggaggggtagcgatcgttgtcaaccagggggtccaccttttccaaagtatgcaaacacatgtcaccctcttcaacatccaggaatgtgattggcttgtaggtgtatttcacgtgacctggggtccccgctgggggggtataaaagggggcggttctttgctcttcctcactgtcttccggatcgctgtccaggaacgtcagctgttggggtaggtattccctctcgaaggcgggcatgacctctgcactcaggttgtcagtttctaagaacgaggaggatttgatattgacagtgccggttgagatgcctttcatgaggttttcgtccatctggtcagaaaacacaatttttttattgtcaagtttggtggcaaatgatccatacagggcgttggataaaagtttggcaatggatcgcatggtttggttcttttccttgtccgcgcgctctttggcggcgatgttgagttggacatactcgcgtgccaggcacttccattcggggaagatagttgttaattcatctggcacgattctcacttgccaccctcgattatgcaaggtaattaaatccacactggtggccacctcgcctcgaaggggttcattggtccaacagagcctacctcctttcctagaacagaaagggggaagtgggtctagcataagttcatcgggagggtctgcatccatggtaaagattcccggaagtaaatccttatcaaaatagctgatgggagtggggtcatctaaggccatttgccattctcgagctgccagtgcgcgctcatatgggttaaggggactgccccatggcatgggatgggtgagtgcagaggcatacatgccacagatgtcatagacgtagatgggatcctcaaagatgcctatgtaggttggatagcatcgcccccctctgatacttgctcgcacatagtcatatagttcatgtgatggcgctagcagccccggacccaagttggtgcgattgggtttttctgttctgtagacgatctggcgaaagatggcgtgagaattggaagagatggtgggtctttgaaaaatgttgaaatgggcatgaggtagacctacagagtctctgacaaagtgggcataagattcttgaagcttggttaccagttcggcggtgacaagtacgtctagggcgcagtagtcaagtgtttcttgaatgatgtcataacctggttggtttttcttttcccacagttcgcggttgagaaggtattcttcgcgatccttccagtactcttctagcggaaacccgtctttgtctgcacggtaagatcctagcatgtagaactgattaactgccttgtaagggcagcagcccttctctacgggtagagagtatgcttgagcagcttttcgtagcgaagcgtgagtaagggcaaaggtgtctctgaccatgactttgaggaattggtatttgaagtcgatgtcgtcacaggctccctgttcccagagttggaagtctacccgtttcttgtaggcggggttgggcaaagcgaaagtaacatcattgaagagaatcttgccggccctgggcatgaaattgcgagtgatgcgaaaaggctgtggtacttccgctcggttattgataacctgggcagctaggacgatctcgtcgaaaccgttgatgttgtgtcctacgatgtataattctatgaaacgcggcgtgcctctgacgtgaggtagcttactgagctcatcaaaggttaggtctgtggggtcagataaggcgtagtgttcgagagcccattcgtgcaggtgaggattcgctttaaggaaggaggaccagaggtccactgccagtgctgtttgtaactggtcccggtactgacgaaaatgccgtccgactgccattttttctggggtgacgcaatagaaggtttgggggtcctgccgccagcgatcccacttgagttttatggcgaggtcataggcgatgttgacgagccgctggtctccagagagtttcatgaccagcatgaaggggattagctgcttgccaaaggaccccatccaggtgtaggtttccacatcgtaggtgagaaagagcctttctgtgcgaggatgagagccaatcgggaagaactggatctcctgccaccagttggaggaatggctgttgatgtgatggaagtagaactccctgcgacgcgccgagcattcatgcttgtgcttgtacagacggccgcagtagtcgcagcgttgcacgggttgtatctcgtgaatgagttgtacctggcttcccttgacgagaaatttcagtgggaagccgaggcctggcgattgtatctcgtgctttactatgttgtctgcatcggcctgttcatcttctgtctcgatggtggtcatgctgacgagccctcgcgggaggcaagtccagacctcggcgcggcaggggcggagctcgaggacgagagcgcgcaggctggagctgtccagggtcctgagacgctgcggactcaggttagtaggcagtgtcaggagattaacttgcatgatcttttggagggcgtgcgggaggttcagatagtacttgatctcaacgggtccgttggtggagatgtcgatggcttgcagggttccgtgtcccttgggcgctaccaccgtgcccttgtttttcattttggacggcggtggctctgttgcttcttgcatgtttagaagcggtgtcgagggcgcgcaccgggcggcaggggcggctcgggacccggcggcatggctggcagtggtacgtcggcgccgcgcgcgggtaggttctggtactgcgccctgagaagactcgcatgcgcgacgacgcggcggttgacatcctggatctgacgcctctgggtgaaagctaccggccccgtgagcttgaacctgaaagagagttcaacagaatcaatctcggtatcgttgacggcggcttgcctaaggatttcttgcacgtcaccagagttgtcctggtaggcgatctccgccatgaactgctcgatctcttcctcttgaagatctccgcggcccgctctctcgacggtggccgcgaggtcgttggagatgcgcccaatgagttgagagaatgcattcatgcccgcctcgttccagacgcggctgtagaccacggcccccacgggatctctcgcgcgcatgaccacctgggcgaggttgagctccacgtggcgggtgaagaccgcatagttgcataggcgctggaaaaggtagttgagtgtggtggcgatgtgctcggtgacgaagaaatacatgatccatcgtctcagcggcatctcgctgacatcgcccagagcttccaagcgctccatggcctcgtagaagtccacggcaaaattaaaaaactgggagtttcgcgcggacacggtcaactcctcttccagaagacggataagttcggcgatggtggtgcgcacctcgcgctcgaaagcccctgggatttcttcctcaatctcttcttcttccactaacatctcttcctcttcaggtggggctgcaggaggagggggaacgcggcgacgccggcggcgcacgggcagacggtcgatgaatctttcaatgacctctccgcggcggcggcgcatggtttcagtgacggcgcggccgttctcgcgcggtcgcagagtaaaaacaccgccgcgcatctccttaaagtggtgactgggaggttctccgtttgggagggagagggcgctgattatacattttattaattggcccgtagggactgcacgcagagatctgatcgtgtcaagatccacgggatctgaaaacctttcgacgaaagcgtctaaccagtcacagtcacaaggtaggctgagtacggcttcttgtgggcgggggtggttatgtgttcggtctgggtcttctgtttcttcttcatctcgggaaggtgagacgatgctgctggtgatgaaattaaagtaggcagttctaagacggcggatggtggcgaggagcaccaggtctttgggtccggcttgctggatacgcaggcgattggccattccccaagcattatcctgacatctagcaagatctttgtagtagtcttgcatgagccgttctacgggcacttcttcctcacccgttctgccatgcatacgtgtgagtccaaatccgcgcattggttgtaccagtgccaagtcagctacgactctttcggcgaggatggcttgctgtacttgggtaagggtggcttgaaagtcatcaaaatccacaaagcggtggtaagctcctgtattaatggtgtaagcacagttggccatgactgaccagttaactgtctggtgaccagggcgcacgagctcggtgtatttaaggcgcgaataggcgcgggtgtcaaagatgtaatcgttgcaggtgcgcaccagatactggtaccctataagaaaatgcggcggtggttggcggtagagaggccatcgttctgtagctggagcgccaggggcgaggtcttccaacataaggcggtgatagccgtagatgtacctggacatccaggtgattcctgcggcggtagtagaagcccgaggaaactcgcgtacgcggttccaaatgttgcgtagcggcatgaagtagttcattgtaggcacggtttgaccagtgaggcgcgcgcagtcattgatgctctatagacacggagaaaatgaaagcgttcagcgactcgactccgtagcctggaggaacgtgaacgggttgggtcgcggtgtaccccggttcgagacttgtactcgagccggccggagccgcggctaacgtggtattggcactcccgtctcgacccagcctacaaaaatccaggatacggaatcgagtcgttttgctggtttccgaatggcagggaagtgagtcctattttttttttttgccgctcagatgcatcccgtgctgcgacagatgcgcccccaacaacagcccccctcgcagcagcagcagcagcaatcacaaaaggctgtccctgcaactactgcaactgccgccgtgagcggtgcgggacagcccgcctatgatctggacttggaagagggcgaaggactggcacgtctaggtgcgccttcacccgagcggcatccgcgagttcaactgaaaaaagattctcgcgaggcgtatgtgccccaacagaacctatttagagacagaagcggcgaggagccggaggagatgcgagcttcccgctttaacgcgggtcgtgagctgcgtcacggtttggaccgaagacgagtgttgcgggacgaggatttcgaagttgatgaaatgacagggatcagtcctgccagggcacacgtggctgcagccaaccttgtatcggcttacgagcagacagtaaaggaagagcgtaacttccaaaagtcttttaataatcatgtgcgaaccctgattgcccgcgaagaagttacccttggtttgatgcatttgtgggatttgatggaagctatcattcagaaccctactagcaaacctctgaccgcccagctgtttctggtggtgcaacacagcagagacaatgaggctttcagagaggcgctgctgaacatcaccgaacccgaggggagatggttgtatgatcttatcaacattctacagagtatcatagtgcaggagcggagcctgggcctggccgagaaggtggctgccatcaattactcggttttgagcttgggaaaatattacgctcgcaaaatctacaagactccatacgttcccatagacaaggaggtgaagatagatgggttctacatgcgcatgacgctcaaggtcttgaccctgagcgatgatcttggggtgtatcgcaatgacagaatgcatcgcgcggttagcgccagcaggaggcgcgagttaagcgacagggaactgatgcacagtttgcaaagagctctgactggagctggaaccgagggtgagaattacttcgacatgggagctgacttgcagtggcagcctagtcgcagggctctgagcgccgcgacggcaggatgtgagcttccttacatagaagaggcggatgaaggcgaggaggaagagggcgagtacttggaagactgatggcacaacccgtgttttttgctagatggaacagcaagcaccggatcccgcaatgcgggcggcgctgcagagccagccgtccggcattaactcctcggacgattggacccaggccatgcaacgtatcatggcgttgacgactcgcaaccccgaagcctttagacagcaaccccaggccaaccgtctatcggccatcatggaagctgtagtgccttcccgctctaatcccactcatgagaaggtcctggccatcgtgaacgcgttggtggagaacaaagctattcgtccagatgaggccggactggtatacaacgctctcttagaacgcgtggctcgctacaacagtagcaatgtgcaaaccaatttggaccgtatgataacagatgtacgcgaagccgtgtctcagcgcgaaaggttccagcgtgatgccaacctgggttcgctggtggcgttaaatgctttcttgagtactcagcctgctaatgtgccgcgtggtcaacaggattatactaactttttaagtgctttgagactgatggtatcagaagtacctcagagcgaagtgtatcagtccggtcctgattacttctttcagactagcagacagggcttgcagacggtaaatctgagccaagcttttaaaaaccttaaaggtttgtggggagtgcatgccccggtaggagaaagagcaaccgtgtctagcttgttaactccgaactcccgcctattattactgttggtagctcctttcaccgacagcggtagcatcgaccgtaattcctatttgggttacctactaaacctgtatcgcgaagccatagggcaaagtcaggtggacgagcagacctatcaagaaattacccaagtcagtcgcgctttgggacaggaagacactggcagtttggaagccactctgaacttcttgcttaccaatcggtctcaaaagatccctcctcaatatgctcttactgcggaggaggagaggatccttagatatgtgcagcagagcgtgggattgtttctgatgcaagagggggcaactccgactgcagcactggacatgacagcgcgaaatatggagcccagcatgtatgccagtaaccgacctttcattaacaaactgctggactacttgcacagagctgccgctatgaactctgattatttcaccaatgccatcttaaacccgcactggctgcccccacctggtttctacacgggcgaatatgacatgcccgaccctaatgacggatttctgtgggacgacgtggacagcgatgttttttcacctctttctgatcatcgcacgtggaaaaaggaaggcggcgatagaatgcattcttctgcatcgctgtccggggtcatgggtgctaccgcggctgagcccgagtctgcaagtccttttcctagtctacccttttctctacacagtgtacgtagcagcgaagtgggtagaataagtcgcccgagtttaatgggcgaagaggagtatctaaacgattccttgctcagaccggcaagagaaaaaaatttcccaaacaatggaatagaaagtttggtggataaaatgagtagatggaagacttatgctcaggatcacagagacgagcctgggatcatggggattacaagtagagcgagccgtagacgccagcgccatgacagacagaggggtcttgtgtgggacgatgaggattcggccgatgatagcagcgtgctggacttgggtgggagaggaaggggcaacccgtttgctcatttgcgccctcgcttgggtggtatgttgtaaaaaaaaataaaaaaaaaactcaccaaggccatggcgacgagcgtacgttcgttcttctttattatctgtgtctagtataatgaggcgagtcgtgctaggcggagcggtggtgtatccggagggtcctcctccttcgtacgagagcgtgatgcagcagcagcaggcgacggcggtgatgcaatccccactggaggctccctttgtgcctccgcgatacctggcacctacggagggcagaaacagcattcgttattcggaactggcacctcagtacgataccaccaggttgtatctggtggacaacaagtcggcggacattgcttctctgaactatcagaatgaccacagcaacttcttgaccacggtggtgcaaaacaatgactttacccctacggaagccagcacccagaccattaactttgatgaacgatcgcggtggggcggtcagctaaagaccatcatgcatactaacatgccaaacgtgaacgagtatatgtttagtaacaagttcaaagcgcgtgtgatggtgtccagaaaacctcccgacggtgctgcagttggggatacttatgatcacaagcaggatattttgaaatatgagtggttcgagtttactttgccagaaggcaacttttcagttactatgactattgatttgatgaacaatgccatcatagataattacttgaaagtgggtagacagaatggagtgcttgaaagtgacattggtgttaagttcgacaccaggaacttcaagctgggatgggatcccgaaaccaagttgatcatgcctggagtgtatacgtatgaagccttccatcctgacattgtcttactgcctggctgcggagtggattttaccgagagtcgtttgagcaaccttcttggtatcagaaaaaaacagccatttcaagagggttttaagattttgtatgaagatttagaaggtggtaatattccggccctcttggatgtagatgcctatgagaacagtaagaaagaacaaaaagccaaaatagaagctgctacagctgctgcagaagctaaggcaaacatagttgccagcgactctacaagggttgctaacgctggagaggtcagaggagacaattttgcgccaacacctgttccgactgcagaatcattattggccgatgtgtctgaaggaacggacgtgaaactcactattcaacctgtagaaaaagatagtaagaatagaagctataatgtgttggaagacaaaatcaacacagcctatcgcagttggtatctttcgtacaattatggcgatcccgaaaaaggagtgcgttcctggacattgctcaccacctcagatgtcacctgcggagcagagcaggtctactggtcgcttccagacatgatgaaggatcctgtcactttccgctccactagacaagtcagtaactaccctgtggtgggtgcagagcttatgcccgtcttctcaaagagcttctacaacgaacaagctgtgtactcccagcagctccgccagtccacctcgcttacgcacgtcttcaaccgctttcctgagaaccagattttaatccgtccgccggcgcccaccattaccaccgtcagtgaaaacgttcctgctctcacagatcacgggaccctgccgttgcgcagcagtatccggggagtccaacgtgtgaccgttactgacgccagacgccgcacctgtccctacgtgtacaaggcactgggcatagtcgcaccgcgcgtcctttcaagccgcactttctaaaaaaaaaaaaaatgtccattcttatctcgcccagtaataacaccggttggggtctgcgcgctccaagcaagatgtacggaggcgcacgcaaacgttctacccaacatcctgtccgtgttcgcggacattttcgcgctccatggggcgccctcaagggccgcactcgcgttcgaaccaccgtcgatgatgtaatcgatcaggtggttgccgacgcccgtaattatactcctactgcgcctacatctactgtggatgcagttattgacagtgtagtggctgacgctcgcaactatgctcgacgtaagagccggcgaaggcgcattgccagacgccaccgagctaccactgccatgcgagccgcaagagctctgctacgaagagctagacgcgtggggcgaagagccatgcttagggcggccagacgtgcagcttcgggcgccagcgccggcaggtcccgcaggcaagcagccgctgtcgcagcggcgactattgccgacatggcccaatcgcgaagaggcaatgtatactgggtgcgtgacgctgccaccggtcaacgtgtacccgtgcgcacccgtccccctcgcacttagaagatactgagcagtctccgatgttgtgtcccagcggcgaggatgtccaagcgcaaatacaaggaagaaatgctgcaggttatcgcacctgaagtctacggccaaccgttgaaggatgaaaaaaaaccccgcaaaatcaagcgggttaaaaaggacaaaaaagaagaggaagatggcgatgatgggctggcggagtttgtgcgcgagtttgccccacggcgacgcgtgcaatggcgtgggcgcaaagttcgacatgtgttgagacctggaacttcggtggtctttacacccggcgagcgttcaagcgctacttttaagcgttcctatgatgaggtgtacggggatgatgatattcttgagcaggcggctgaccgattaggcgagtttgcttatggcaagcgtagtagaataacttccaaggatgagacagtgtcgatacccttggatcatggaaatcccacccctagtcttaaaccggtcactttgcagcaagtgttacccgtaactccgcgaacaggtgttaaacgcgaaggtgaagatttgtatcccactatgcaactgatggtacccaaacgccagaagttggaggacgttttggagaaagtaaaagtggatccagatattcaacctgaggttaaagtgagacccattaagcaggtagcgcctggtctgggggtacaaactgtagacattaagattcccactgaaagtatggaagtgcaaactgaacccgcaaagcctactgccacctccactgaagtgcaaacggatccatggatgcccatgcctattacaactgacgccgccggtcccactcgaagatcccgacgaaagtacggtccagcaagtctgttgatgcccaattatgttgtacacccatctattattcctactcctggttaccgaggcactcgctactatcgcagccgaaacagtacctcccgccgtcgccgcaagacacctgcaaatcgcagtcgtcgccgtagacgcacaagcaaaccgactcccggcgccctggtgcggcaagtgtaccgcaatggtagtgcggaacctttgacactgccgcgtgcgcgttaccatccgagtatcatcacttaatcaatgttgccgctgcctccttgcagatatggccctcacttgtcgccttcgcgttcccatcactggttaccgaggaagaaactcgcgccgtagaagagggatgttgggacgcggaatgcgacgctacaggcgacggcgtgctatccgcaagcaattgcggggtggttttttaccagccttaattccaattatcgctgctgcaattggcgcgataccaggcatagcttccgtggcggttcaggcctcgcaacgacattgacattggaaaaaaacgtataaataaaaaaaaaaaaatacaatggactctgacactcctggtcctgtgactatgttttcttagagatggaagacatcaatttttcatccttggctccgcgacacggcacgaagccgtacatgggcacctggagcgacatcggcacgagccaactgaacgggggcgccttcaattggagcagtatctggagcgggcttaaaaattttggctcaaccataaaaacatacgggaacaaagcttggaacagcagtacaggacaggcgcttagaaataaacttaaagaccagaacttccaacaaaaagtagtcgatgggatagcttccggcatcaatggagtggtagatttggctaaccaggctgtgcagaaaaagataaacagtcgtttggacccgccgccagcaaccccaggtgaaatgcaagtggaggaagaaattcctccgccagaaaaacgaggcgacaagcgtccgcgtcccgatttggaagagacgctggtgacgcgcgtagatgaaccgccttcttatgaggaagcaacgaagcttggaatgcccaccactagaccgatagccccaatggccaccggggtgatgaaaccttctcagttgcatcgacccgtcaccttggatttgccccctccccctgctgctactgctgtacccgcttctaagcctgtcgctgccccgaaaccagtcgccgtagccaggtcacgtcccgggggcgctcctcgtccaaatgcgcactggcaaaatactctgaacagcatcgtgggtctaggcgtgcaaagtgtaaaacgccgtcgctgcttttaattaaatatggagtagcgcttaacttgcctatctgtgtatatgtgtcattacacgccgtcacagcagcagaggaaaaaaggaagaggtcgtgcgtcgacgctgagttactttcaagatggccaccccatcgatgctgccccaatgggcatacatgcacatcgccggacaggatgcttcggagtacctgagtccgggtctggtgcagttcgcccgcgccacagacacctacttcaatctgggaaataagtttagaaatcccaccgtagcgccgacccacgatgtgaccaccgaccgtagccagcggctcatgttgcgcttcgtgcccgttgaccgggaggacaatacatactcttacaaagtgcggtacaccctggccgtgggcgacaacagagtgctggatatggccagcacgttctttgacattaggggtgtgttggacagaggtcccagtttcaaaccctattctggtacggcttacaactccctggctcctaaaggcgctccaaatacatctcagtggattgcagaaggtgtaaaaaatacaactggtgaggaacacgtaacagaagaggaaaccaatactactacttacacttttggcaatgctcctgtaaaagctgaagctgaaattacaaaagaaggactcccagtaggtttggaagtttcagatgaagaaagtaaaccgatttatgctgataaaacatatcagccagaacctcagctgggagatgaaacttggactgaccttgatggaaaaaccgaaaagtatggaggcagggctctcaaacccgatactaagatgaaaccatgctacgggtcctttgccaaacctactaatgtgaaaggcggtcaggcaaaacaaaaaacaacggagcagccaaatcagaaagtcgaatatgatatcgacatggagttttttgatgcggcatcgcagaaaacaaacttaagtcctaaaattgtcatgtatgcagaaaatgtaaatttggaaactccagacactcatgtagtgtacaaacctggaacagaagacacaagttccgaagctaatttgggacaacaatctatgcccaacagacccaactacattggcttcagagataactttattggacttatgtactataacagtactggtaacatgggggtgctggctggtcaagcgtctcagttaaatgcagtggttgacttgcaggacagaaacacagaactttcttaccaactcttgcttgactctctgggcgacagaaccagatactttagcatgtggaatcaggctgtggacagttatgatcctgatgtacgtgttattgaaaatcatggtgtggaagatgaacttcccaactactgttttccactggacggcataggtgttccaacaaccagttacaaatcaatagttccaaatggagacaatgcgcctaattggaaggaacctgaagtaaatggaacaagtgagatcggacagggtaatttgtttgccatggaaattaaccttcaagccaatctatggcgaagtttcctttattccaatgtggctctatatctcccagactcgtacaaatacaccccgtccaatgtcactcttccagaaaacaaaaacacctacgactacatgaacgggcgggtggtgccgccatctctagtagacacctatgtgaacattggtgccaggtggtctctggatgccatggacaatgtcaacccattcaaccaccaccgtaacgctggcttgcgttaccgatccatgcttctgggtaacggacgttatgtgcctttccacatacaagtgcctcaaaaattcttcgctgttaaaaacctgctgcttctcccaggctcctacacttatgagtggaactttaggaaggatgtgaacatggttctacagagttccctcggtaacgacctgcgggtagatggcgccagcatcagtttcacgagcatcaacctctatgctacttttttccccatggctcacaacaccgcttccacccttgaagccatgctgcggaatgacaccaatgatcagtcattcaacgactacctatctgcagctaacatgctctaccccattcctgccaatgcaaccaatattcccatttccattccttctcgcaactgggcggctttcagaggctggtcatttaccagactgaaaaccaaagaaactccctctttggggtctggatttgacccctactttgtctattctggttctattccctacctggatggtaccttctacctgaaccacacttttaagaaggtttccatcatgtttgactcttcagtgagctggcctggaaatgacaggttactatctcctaacgaatttgaaataaagcgcactgtggatggcgaaggctacaacgtagcccaatgcaacatgaccaaagactggttcttggtacagatgctcgccaactacaacatcggctatcagggcttctacattccagaaggatacaaagatcgcatgtattcatttttcagaaacttccagcccatgagcaggcaggtggttgatgaggtcaattacaaagacttcaaggccgtcgccataccctaccaacacaacaactctggctttgtgggttacatggctccgaccatgcgccaaggtcaaccctatcccgctaactatccctatccactcattggaacaactgccgtaaatagtgttacgcagaaaaagttcttgtgtgacagaaccatgtggcgcataccgttctcgagcaacttcatgtctatgggggcccttacagacttgggacagaatatgctctatgccaactcagctcatgctctggacatgacctttgaggtggatcccatggatgagcccaccctgctttatcttctcttcgaagttttcgacgtggtcagagtgcatcagccacaccgcggcatcatcgaggcagtctacctgcgtacaccgttctcggccggtaacgctaccacgtaagaagcttcttgcttcttgcaaatagcagctgcaaccatggcctgcggatcccaaaacggctccagcgagcaagagctcagagccattgtccaagacctgggttgcggaccctattttttgggaacctacgataagcgcttcccggggttcatggcccccgataagctcgcctgtgccattgtaaatacggccggacgtgagacggggggagagcactggttggctttcggttggaacccacgttctaacacctgctacctttttgatccttttggattctcggatgatcgtctcaaacagatttaccagtttgaatatgagggtctcctgcgccgcagcgctcttgctaccaaggaccgctgtattacgctggaaaaatctacccagaccgtgcagggtccccgttctgccgcctgcggacttttctgctgcatgttccttcacgcctttgtgcactggcctgaccgtcccatggacggaaaccccaccatgaaattgctaactggagtgccaaacaacatgcttcattctcctaaagtccagcccaccctgtgtgacaatcaaaaagcactctaccattttcttaatacccattcgccttattttcgctcccatcgtacacacatcgaaagggccactgcgttcgaccgtatggatgttcaataatgactcatgtaaacaacgtgttcaataaacatcactttatttttttacatgtatcaaggctctgcattacttatttatttacaagtcgaatgggttctgacgagaatcagaatgacccgcaggcagtgatacgttgcggaactgatacttgggttgccacttgaattcgggaatcaccaacttgggaaccggtatatcgggcaggatgtcactccacagctttctggtcagctgcaaagctccaagcaggtcaggagccgaaatcttgaaatcacaattaggaccagtgctttgagcgcgagagttgcggtacaccggattgcagcactgaaacaccatcagcgacggatgtctcacgcttgccagcacggtgggatctgcaatcatgcccacatccagatcttcagcattggcaatgctgaacggggtcatcttgcaggtctgcctacccatggcgggcacccaattaggcttgtggttgcaatcgcagtgcagggggatcagtatcatcttggcctgatcctgtctgattcctggatacacggctctcatgaaagcatcatattgcttgaaagcctgctgggctttactaccctcggtataaaacatcccgcaggacctgctcgaaaactggttagctgcacagccggcatcattcacacagcagcgggcgtcattgttagctatttgcaccacacttctgccccagcggttttgggtgattttggttcgctcgggattctcctttaaggctcgttgtccgttctcgctggccacatccatctcgataatctgctccttctgaatcataatattgccatgcaggcacttcagcttgccctcataatcattgcagccatgaggccacaacgcacagcctgtacattcccaattatggtgggcgatctgagaaaaagaatgtatcattccctgcagaaatcttcccatcatcgtgctcagtgtcttgtgactagtgaaagttaactggatgcctcggtgctcctcgtttacgtactggtgacagatgcgcttgtattgttcgtgttgctcaggcattagtttaaaagaggttctaagttcgttatccagcctgtacttctccatcagcagacacatcacttccatgcctttctcccaagcagacaccaggggcaagctaatcggattcttaacagtgcaggcagcagctcctttagccagagggtcatctttagcgatcttctcaatgcttcttttgccatccttctcaacgatgcgcacgggcgggtagctgaaacccactgctacaagttgcgcctcttctctttcttcttcgctgtcttgactgatgtcttgcatggggatatgtttggtcttccttggcttctttttggggggtatcggaggaggaggactgtcgctccgttccggagacagggaggattgtgacgtttcgctcaccattaccaactgactgtcggtagaagaacctgaccccacacggcgacaggtgtttctcttcgggggcagaggtggaggcgattgcgaagggctgcggtccgacctggaaggcggatgactggcagaaccccttccgcgttcgggggtgtgctccctgtggcggtcgcttaactgatttccttcgcggctggccattgtgttctcctaggcagagaaacaacagacatggaaactcagccattgctgtcaacatcgccacgagtgccatcacatctcgtcctcagcgacgaggaaaaggagcagagcttaagcattccaccgcccagtcctgccaccacctctaccctagaagataaggaggtcgacgcatctcatgacatgcagaataaaaaagcgaaagagtctgagacagacatcgagcaagacccgggctatgtgacaccggtggaacacgaggaagagttgaaacgctttctagagagagaggatgaaaactgcccaaaacaacgagcagataactatcaccaagatgctggaaatagggatcagaacaccgactacctcatagggcttgacggggaagacgcgctccttaaacatctagcaagacagtcgctcatagtcaaggatgcattattggacagaactgaagtgcccatcagtgtggaagagctcagccgcgcctacgagcttaacctcttttcacctcgtactccccccaaacgtcagccaaacggcacctgcgagccaaatcctcgcttaaacttttatccagcttttgctgtgccagaagtactggctacctatcacatcttttttaaaaatcaaaaaattccagtctcctgccgcgctaatcgcacccgcgccgatgccctactcaatctgggacctggttcacgcttacctgatatagcttccttggaagaggttccaaagatcttcgagggtctgggcaataatgagactcgggccgcaaatgctctgcaaaagggagaaaatggcatggatgagcatcacagcgttctggtggaattggaaggcgataatgccagactcgcagtactcaagcgaagcatcgaggtcacacacttcgcatatcccgctgtcaacctgccccctaaagtcatgacggcggtcatggaccagttactcattaagcgcgcaagtcccctttcagaagacatgcatgacccagatgcctgtgatgagggtaaaccagtggtcagtgatgagcagctaacccgatggctgggcaccgactctcccagggatttggaagagcgtcgcaagcttatgatggccgtggtgctggttaccgtagaactagagtgtctccgacgtttctttaccgattcagaaaccttgcgcaaactcgaagagaatctgcactacacttttagacacggctttgtgcggcaggcatgcaagatatctaacgtggaactcaccaacctggtttcctacatgggtattctgcatgagaatcgcctaggacaaagcgtgctgcacagcaccctgaagggggaagcccgccgtgattacatccgcgattgtgtctatctgtacctgtgccacacgtggcaaaccggcatgggtgtatggcagcaatgtttagaagaacagaacttgaaagagcttgacaagctcttacagaaatctcttaaggttctgtggacagggttcgacgagcgcaccgtcgcttccgacctggcagacctcatcttcccagagcgtctcagggttactttgcgaaacggattgcctgactttatgagccagagcatgcttaacaattttcgctctttcatcctggaacgctccggtatcctgcccgccacctgctgcgcactgccctccgactttgtgcctctcacctaccgcgagtgccccccgccgctatggagtcactgctacctgttccgtctggccaactatctctcctaccactcggatgtgatcgaggatgtgagcggagacggcttgctggagtgtcactgccgctgcaatctgtgcacgccccaccggtccctagcttgcaacccccagttgatgagcgaaacccagataataggcacctttgaattgcaaggccccagcagccaaggcgatgggtcttctcctgggcaaagtttaaaactgaccccgggactgtggacctccgcctacttgcgcaagtttgctccggaagattaccacccctatgaaatcaagttctatgaggaccaatcacagcctccaaaggccgaactttcggcctgcgtcatcacccagggggcaattctggcccaattgcaagccatccaaaaatcccgccaagaatttctactgaaaaagggtaagggggtctaccttgacccccagaccggcgaggaactcaacacaaggttccctcaggatgtcccaacgacgagaaaacaagaagttgaaggtgcagccgccgcccccagaagatatggaggaagattgggacagtcaggcagaggaggcggaggaggacagtctggaggacagtctggaggaagacagtttggaggaggaaaacgaggaggcagaggaggtggaagaagtaaccgccgacaaacagttatcctcggctgcggagacaagcaacagcgctaccatctccgctccgagtcgaggaacccggcggcgtcccagcagtagatgggacgagaccggacgcttcccgaacccaaccagcgcttccaagaccggtaagaaggatcggcagggatacaagtcctggcgggggcataagaatgccatcatctcctgcttgcatgagtgcgggggcaacatatccttcacgcggcgctacttgctattccaccatggggtgaactttccgcgcaatgttttgcattactaccgtcacctccacagcccctactatagccagcaaatcccggcagtctcgacagataaagacagcggcggcgacctccaacagaaaaccagcagcggcagttagaaaatacacaacaagtgcagcaacaggaggattaaagattacagccaacgagccagcgcaaacccgagagttaagaaatcggatctttccaaccctgtatgccatcttccagcagagtcggggtcaagagcaggaactgaaaataaaaaaccgatctctgcgttcgctcaccagaagttgtttgtatcacaagagcgaagatcaacttcagcgcactctcgaggacgccgaggctctcttcaacaagtactgcgcgctgactcttaaagagtaggcagcgaccgcgcttattcaaaaaaggcgggaattacatcatcctcgacatgagtaaagaaattcccacgccttacatgtggagttatcaaccccaaatgggattggcggcaggcgcctcccaggactactccacccgcatgaattggctcagcgccgggccttctatgatttctcgagttaatgatatacgcgcctaccgaaaccaaatacttttggaacagtcagctcttaccaccacgccccgccaacaccttaatcccagaaattggcccgccgccctagtgtaccaggaaagtcccgctcccaccactgtattacttcctcgagacgcccaggccgaagtccaaatgactaatgcaggtgcgcagttagctggcggctccaccctatgtcgtcacaggcctcggcataatataaaacgcctgatgatcagaggccgaggtatccagctcaacgacgagtcggtgagctctccgcttggtctacgaccagacggaatctttcagattgccggctgcgggagatcttccttcacccctcgtcaggctgttctgactttggaaagttcgtcttcgcaaccccgctcgggcggaatcgggaccgttcaatttgtggaggagtttactccctctgtctacttcaaccccttctccggatctcctgggcattacccggacgagttcataccgaacttcgacgcgattagcgagtcagtggacggctacgattgatgtctggtgacgcggctgagctatctcggctgcgacatctagaccactgccgccgctttcgctgctttgcccgggaactcattgagttcatctacttcgaactccccaaggatcaccctcaaggtccggcccacggagtgcggatttctatcgaaggcaaaatagactctcgcctgcaacgaattttctcccagcggcccgtgctgatcgagcgagaccagggaaacaccacggtttccatctactgcatttgtaatcaccccggattgcatgaaagcctttgctgtcttatgtgtactgagtttaataaaaactgaattaagactctcctacggactgccgcttcttcaacccggattttacaaccagaagaacgaaacttttcctgtcgtccaggactctgttaacttcacctttcctactcacaaactagaagctcaacgactacaccgcttttccagaagcattttccctactaatactactttcaaaaccggaggtgagctccaaggtcttcctacagaaaacccttgggtggaagcgggccttgtagtgctaggaattcttgcgggtgggcttgtgattattctttgctacctatacacaccttgcttcactttcttagtggtgttgtggtattggtttaaaaaatggggcccatactagtcttgcttgttttactttcgcttttggaaccgggttctgccaattacgatccatgtctagacttcgacccagaaaactgcacacttacttttgcacccgacacaagccgcatctgtggagttcatcgcctctcttacgaacttggcccccaacgacaaaaatttacctgcatggtgggaatcaaccccatagttatcacccagcaaagtggagatactaagggttgcattcactgctcctgcgattccatcgagtgcacctacaccctgctgaagaccctatgcggcctaagagacctgctaccaatgaattaaaaaatgattaataaaaaatcacttacttgaaatcagcaataaggtctctgttgaaattttctcccagcagcacctcacttccctcttcccaactctggtattctaaaccccgttcagcggcatactttctccatactttaaaggggatgtcaaattttagctcctctcctgtacccacaatcttcatgtctttcttcccagatgaccaagagagtccggctcagtgactccttcaaccctgtctacccctatgaagatgaaagcacctcccaacacccctttataaacccagggtttatttccccaaatggcttcacacaaagcccaaacggagttcttactttaaaatgtttaaccccactaacaaccacaggcggatctctacagctaaaagtgggagggggacttacagtggatgacaccaacggttttttgaaagaaaacataagtgccaccacaccactcgttaagactggtcactctataggtttaccactaggagccggattgggaacgaatgaaaataaactttgtatcaaattaggacaaggacttacattcaattcaaacaacatttgcattgatgacaatattaacaccttatggacaggagtcaaccccaccgaagccaactgtcaaatcatgaactccagtgaatctaatgattgcaaattaattctaacactagttaaaactggagcactagtcactgcatttgtttatgttataggagtatctaacaattttaatatgctaactacacacagaaatataaattttactgcagagctgtttttcgattctactggtaatttactaactagactctcatccctcaaaactccacttaatcataaatcaggacaaaacatggctactggtgccattactaatgctaaaggtttcatgcccagcacgactgcctatcctttcaatgataattctagagaaaaagaaaactacatttacggaacttgttactacacagctagtgatcgcactgcttttcccattgacatatctgtcatgcttaaccgaagagcaataaatgacgagacatcatattgtattcgtataacttggtcctggaacacaggagatgccccagaggtgcaaacctctgctacaaccctagtcacctccccatttaccttttactacatcagagaagacgactgacaaataaagtttgcgatcgccaggcccaccatggctcagtcactggctctgagcctccttatcctggttctggcctttggcatccccaggacccaaggcagtgatggaggggctcaggactgttgcctcaagtacagccaaaggaagattcccgccaaggttgtccgcagctaccggaagcaggaaccaagcttaggctgctccatcccagctatcctgttcttgccccgcaagcgctctcaggcagagctatgtgcagacccaaaggagctctgggtgcagcagctgatgcagcatctggacaagacaccatccccacagaaaccagcccagggctgcaggaaggacaggggggcctccaagactggcaagaaaggaaagggctccaaaggctgcaagaggactgagcggtcacagacccctaaagggccaggaagcggagctactaacttcagcctgctgaagcaggctggagacgtggaggagaaccctggacctgactggacctggcgcatcctgttcttggtggcagctgctacgggagctcattccaactgggtgaatgtaataagtgatttgaaaaaaattgaagatcttattcaatctatgcatattgatgctactttatatacggaaagtgatgttcaccccagttgcaaagtaacagcaatgaagtgctttctcttggagttacaagttatttcacttgagtccggagatgcaagtattcatgatacagtagaaaatctgatcatcctagcaaacaacagtttgtcttctaatgggaatgtaacagaatctggatgcaaagaatgtgaggaactggaggaaaaaaatattaaagaatttttgcagagttttgtacatattgtccaaatgttcatcaacacttctggaagcggagagggcagaggaagtctgctaacatgcggtgacgtcgaggagaatcctggacctgccttgacctttgctttactggtggccctcctggtgctcagctgcaagtcaagctgctctgtgggctgtgatctgcctcaaacccacagcctgggtagcaggaggaccttgatgctcctggcacagatgaggagaatctctcttttctcctgcttgaaggacagacatgactttggatttccccaggaggagtttggcaaccagttccaaaaggctgaaaccatccctgtcctccatgagatgatccagcagatcttcaatctcttcagcacaaaggactcatctgctgcttgggatgagaccctcctagacaaattctacactgaactctaccagcagctgaatgacctggaagcctgtgtgatacagggggtgggggtgacagagactcccctgatgaaggaggactccattctggctgtgaggaaatacttccaaagaatcactctctatctgaaagagaagaaatacagcccttgtgcctgggaggttgtcagagcagaaatcatgagatctttttctttgtcaacaaacttgcaagaaagtttaagaagtaaggaaggaagcggacagtgtactaattatgctctcttgaaattggctggagatgttgagagcaaccctggacctaagaaaagtggtgttcttttcctcttgggcatcatcttgctggttctgattggagtgcaaggaaccccagtagtgagaaagggtcgctgttcctgcatcagcaccaaccaagggactatccacctacaatccttgaaagaccttaaacaatttgccccaagcccttcctgcgagaaaattgaaatcattgctacactgaagaatggagttcaaacatgtctaaacccagattcagcagatgtgaaggaactgattaaaaagtgggagaaacaggtcagccaaaagaaaaagcaaaagaatgggaaaaaacatcaaaaaaagaaagttctgaaagttcgaaaatctcaacgttctcgtcaaaagaagactacaggaagcggagtgaaacagactttgaattttgaccttctcaagttggcgggagacgtggagtccaaccctggacctatgtgtcaccagcagttggtcatctcttggttttccctggtttttctggcatctcccctcgtggccatatgggaactgaagaaagatgtttatgtcgtagaattggattggtatccggatgcccctggagaaatggtggtcctcacctgtgacacccctgaagaagatggtatcacctggaccttggaccagagcagtgaggtcttaggctctggcaaaaccctgaccatccaagtcaaagagtttggagatgctggccagtacacctgtcacaaaggaggcgaggttctaagccattcgctcctgctgcttcacaaaaaggaagatggaatttggtccactgatattttaaaggaccagaaagaacccaaaaataagacctttctaagatgcgaggccaagaattattctggacgtttcacctgctggtggctgacgacaatcagtactgatttgacattcagtgtcaaaagcagcagaggctcttctgacccccaaggggtgacgtgcggagctgctacactctctgcagagagagtcagaggggacaacaaggagtatgagtactcagtggagtgccaggaggacagtgcctgcccagctgctgaggagagtctgcccattgaggtcatggtggatgccgttcacaagctcaagtatgaaaactacaccagcagcttcttcatcagggacatcatcaaacctgacccacccaagaacttgcagctgaagccattaaagaattctcggcaggtggaggtcagctgggagtaccctgacacctggagtactccacattcctacttctccctgacattctgcgttcaggtccagggcaagagcaagagagaaaagaaagatagagtcttcacggacaagacctcagccacggtcatctgccgcaaaaatgccagcattagcgtgcgggcccaggaccgctactatagctcatcttggagcgaatgggcatctgtgccctgcagtggagggggcggcagcgggggaggcggcagcggcggcgggggatcgagaaacctccccgtggccactccagacccaggaatgttcccatgccttcaccactcccaaaacctgctgagggccgtcagcaacatgctccagaaggccagacaaactctagaattttacccttgcacttctgaagagattgatcatgaagatatcacaaaagataaaaccagcacagtggaggcctgtttaccattggaattaaccaagaatgagagttgcctaaattccagagagacctctttcataactaatgggagttgcctggcctccagaaagacctcttttatgatggccctgtgccttagtagtatttatgaagacttgaagatgtaccaggtggagttcaagaccatgaatgcaaagcttctgatggatcctaagaggcagatctttctagatcaaaacatgctggcagttattgatgagctgatgcaggccctgaatttcaacagtgagactgtgccacaaaaatcctcccttgaagaaccggatttttataaaactaaaatcaagctctgcatacttcttcatgctttcagaattcgggcagtgactattgatagagtgatgagctatctgaatgcttcctaagctagcttgactgactgagatacagcgtaccttcagctcacagacatgataagatacattgatgagtttggacaaaccacaactagaatgcagtgaaaaaaatgctttatttgtgaaatttgtgatgctattgctttatttgtaaccattataagctgcaataaacaagttaacaacaacaattgcattcattttatgtttcaggttcagggggaggtgtgggaggttttttaaagcaagtaaaacctctacaaatgtggtagtcgtcagctatcctgcaggaacttgtttatttgaaaatcaattcacaaaatccgagtagttattttgcctcccccttcccatttaacagaatacaccaatctctccccacgcacagctttaaacatttggataccattagatatagacatggttttagattccacattccaaacagtttcagagcgagccaatctggggtcagtgatagataaaaatccatcgggatagtcttttaaagcgctttcacagtccaactgctgcggatgcgactccggagtctggatcacggtcatctggaagaagaacgatgggaatcataatccgaaaacggtatcggacgattgtgtctcatcaaacccacaagcagccgctgtctgcgtcgctccgtgcgactgctgtttatgggatcagggtccacagtgtcctgaagcatgattttaatagcccttaacatcaactttctggtgcgatgcgcgcagcaacgcattctgatttcactcaaatctttgcagtaggtacaacacattattacaatattgtttaataaaccataattaaaagcgctccagccaaaactcatatctgatataatcgcccctgcatgaccatcataccaaagtttaatataaattaaatgacgttccctcaaaaacacactacccacatacatgatctcttttggcatgtgcatattaacaatctgtctgtaccatggacaacgttggttaatcatgcaacccaatataaccttccggaaccacactgccaacaccgctcccccagccatgcattgaagtgaaccctgctgattacaatgacaatgaagaacccaattctctcgaccgtgaatcacttgagaatgaaaaatatctatagtggcacaacatagacataaatgcatgcatcttctcataatttttaactcctcaggatttagaaacatatcccagggaataggaagctcttgcagaacagtaaagctggcagaacaaggaagaccacgaacacaacttacactatgcatagtcatagtatcacaatctggcaacagcgggtggtcttcagtcatagaagctcgggtttcattttcctcacaacgtggtaactgggctctggtgtaagggtgatgtctggcgcatgatgtcgagcgtgcgcgcaaccttgtcataatggagttgcttcctgacattctcgtattttgtatagcaaaacgcggccctggcagaacacactcttcttcgccttctatcctgccgcttagcgtgttccgtgtgatagttcaagtacaaccacactcttaagttggtcaaaagaatgctggcttcagttgtaatcaaaactccatcgcatctaatcgttctgaggaaatcatccaagcaatgcaactggattgtgtttcaagcaggagaggagagggaagagacggaagaaccatgttaatttttattccaaacgatctcgcagtacttcaaattgtagatcgcgcagatggcatctctcgcccccactgtgttggtgaaaaagcacagctagatcaaaagaaatgcgattttcaaggtgctcaacggtggcttccagcaaagcctccacgcgcacatccaagaacaaaagaataccaaaagaaggagcattttctaactcctcaatcatcatattacattcctgcaccattcccagataattttcagctttccagccttgaattattcgtgtcagttcttgtggtaaatccaatccacacattacaaacaggtcccggagggcgccctccaccaccattcttaaacacaccctcataatgacaaaatatcttgctcctgtgtcacctgtagcgaattgagaatggcaacatcaattgacatgcccttggctctaagttcttctttaagttctagttgtaaaaactctctcatattatcaccaaactgcttagccagaagccccccgggaacaagagcaggggacgctacagtgcagtacaagcgcagacctccccaattggctccagcaaaaacaagattggaataagcatattgggaaccgccagtaatatcatcgaagttgctggaaatataatcaggcagagtttcttgtaaaaattgaataaaagaaaaatttgccaaaaaaacattcaaaacctctgggatgcaaatgcaataggttaccgcgctgcgctccaacattgttagttttgaattagtctgcaaaaataaaaaaaaaaacaagcgtcatatcatagtagcctgacgaacagatggataaatcagtctttccatcacaagacaagccacagggtctccagctcgaccctcgtaaaacctgtcatcatgattaaacaacagcaccgaaagttcctcgcggtgaccagcatgaataattcttgatgaagcatacaatccagacatgttagcatcagttaacgagaaaaaacagccaacatagcctttgggtataattatgcttaatcgtaagtatagcaaagccacccctcgcggatacaaagtaaaaggcacaggagaataaaaaatataattatttctctgctgctgttcaggcaacgtcgcccccggtccctctaaatacacatacaaagcctcatcagccatggcttaccagacaaagtacagcgggcacacaaagcacaagctctaaagtgactctccaacctctccacaatatatatatacacaagccctaaactgacgtaatgggagtaaagtgtaaaaaatcccgccaaacccaacacacaccccgaaactgcgtcaccagggaaaagtacagtttcacttccgcaatcccaacaggcgtaacttcctctttctcacggtacgtgatatcccactaacttgcaacgtcattttcccacggtcgcaccgccccttttagccgttaaccccacagccaatcaccacacgatccacactttttaaaatcacctcatttacatattggcaccattccatctataaggtatattatatagataga

SEQ ID NO: 94 - DNA, 36253 bp, Artificial Sequence
  Genome sequence of NG-751 virus
tctatctatataatataccttatagatggaatggtgccaatatgtaaatgaggtgattttaaaaagtgtggatcgtgtggtgattggctgtggggttaacggctaaaaggggcggtgcgaccgtgggaaaatgacgttttgtgggggtggagtttttttgcaagttgtcgcgggaaatgtgacgcataaaaaggcttttttctcacggaactacttagttttcccacggtatttaacaggaaatgaggtagttttgaccggatgcaagtgaaaattgttgattttcgcgcgaaaactgaatgaggaagtgtttttctgaataatgtggtatttatggcagggtggagtatttgttcagggccaggtagactttgacccattacgtggaggtttcgattaccgtgttttttacctgaatttccgcgtaccgtgtcaaagtcttctgtttttacgtaggtgtcagctgatcgctagggtatttatacctcagggtttgtgtcaagaggccactcttgagtgccagcgagaagagttttctcctctgcgccggcagtttaataataaaaaaatgagagatttgcgatttctgcctcaggaaataatctctgctgagactggaaatgaaatattggagcttgtggtgcacgccctgatgggagacgatccggagccacctgtgcagctttttgagcctcctacgcttcaggaactgtatgatttagaggtagagggatcggaggattctaatgaggaagctgtaaatggcttttttaccgattctatgcttttagctgctaatgaagggttagaattagatccgcctttggacacttttgatactccaggggtaattgtggaaagcggtacaggtgtaagaaaattacctgatttgagttccgtggactgtgatttgcactgctatgaagacgggtttcctccgagtgatgaggaggaccatgaaaaggagcagtccatgcagactgcagcgggtgagggagtgaaggctgccaatgttggttttcagttggattgcccggagcttcctggacatggctgtaagtcttgtgaatttcacaggaaaaatactggagtaaaggaactgttatgttcgctttgttatatgagaacgcactgccactttatttacagtaagtgtgtttaagttaaaatttaaaggaatatgctgtttttcacatgtatattgagtgtgagttttgtgcttcttattataggtcctgtgtctgatgctgatgaatcaccatctcctgattctactacctcacctcctgagattcaagcacctgttcctgtggacgtgcgcaagcccattcctgtgaagcttaagcctgggaaacgtccagcagtggaaaaacttgaggacttgttacagggtggggacggacctttggacttgagtacacggaaacgtccaagacaataagtgttccatatccgtgtttacttaaggtgacgtcaatatttgtgtgacagtgcaatgtaataaaaatatgttaactgttcactggtttttattgctttttgggcggggactcaggtatataagtagaagcagacctgtgtggttagctcataggagctggctttcatccatggaggtttgggccattttggaagaccttaggaagactaggcaactgttagagaacgcttcggacggagtctccggtttttggagattctggttcgctagtgaattagctagggtagtttttaggataaaacaggactataaacaagaatttgaaaagttgttggtagattgcccaggactttttgaagctcttaatttgggccatcaggttcactttaaagaaaaagttttatcagttttagacttttcaaccccaggtagaactgctgctgctgtggcttttcttacttttatattagataaatggatcccgcagactcatttcagcaggggatacgttttggatttcatagccacagcattgtggagaacatggaaggttcgcaagatgaggacaatcttaggttactggccagtgcagcctttgggtgtagcgggaatcctgaggcatccaccggtcatgccagcggttctggaggaggaacagcaagaggacaacccgagagccggcctggaccctccagtggaggaggcggagtagctgacttgtctcctgaactgcaacgggtgcttactggatctacgtccactggacgggataggggcgttaagagggagagggcatctagtggtactgatgctagatctgagttggctttaagtttaatgagtcgcagacgtcctgaaaccatttggtggcatgaggttcagaaagagggaagggatgaagtttctgtattgcaggagaaatattcactggaacaggtgaaaacatgttggttggagcctgaggatgattgggaggtggccattaaaaattatgccaagatagctttgaggcctgataaacagtataagattactagacggattaatatccggaatgcttgttacatatctggaaatggggctgaggtggtaatagatactcaagacaaggcagttattagatgctgcatgatggatatgtggcctggggtagtcggtatggaagcagtaacttttgtaaatgttaagtttaggggagatggttataatggaatagtgtttatggccaataccaaacttatattgcatggttgtagcttttttggtttcaacaatacctgtgtagatgcctggggacaggttagtgtacggggatgtagtttctatgcgtgttggattgccacagctggcagaaccaagagtcaattgtctctgaagaaatgcatatttcaaagatgtaacctgggcattctgaatgaaggcgaagcaagggtccgccactgcgcttctacagatactggatgttttattttgattaagggaaatgccagcgtaaagcataacatgatttgcggtgcttccgatgagaggccttatcaaatgctcacttgtgctggtgggcattgtaatatgctggctactgtgcatattgtttcccatcaacgcaaaaaatggcctgtttttgatcacaatgtgatgacgaagtgtaccatgcatgcaggtgggcgtagaggaatgtttatgccttaccagtgtaacatgaatcatgtgaaagtgttgttggaaccagatgccttttccagaatgagcctaacaggaatttttgacatgaacatgcaaatctggaagatcctgaggtatgatgatacgagatcgagggtacgcgcatgcgaatgcggaggcaagcatgccaggttccagccggtgtgtgtagatgtgactgaagatctcagaccggatcatttggttattgcccgcactggagcagagttcggatccagtggagaagaaactgactaaggtgagtattgggaaaactttggggtgggattttcagatggacagattgagtaaaaatttgttttttctgtcttgcagctgtcatgagtggaaacgcttcttttaaggggggagtcttcagcccttatctgacagggcgtctcccatcctgggcaggagttcgtcagaatgttatgggatctactgtggatggaagacccgtccaacccgccaattcttcaacgctgacctatgctactttaagttcttcacctttggacgcagctgcagctgccgccgccgcttctgttgccgctaacactgtgcttggaatgggttactatggaagcatcatggctaattccacttcctctaataacccttctaccctgactcaggacaagttacttgtccttttggcccagctggaggctttgacccaacgtctgggtgaactttctcagcaggtggtcgagttgcgagtacaaactgagtctgctgtcggcacggcaaagtctaaataaaaaaatcccagaatcaatgaataaataaacaagcttgttgttgatttaaaatcaagtgtttttatttcatttttcgcgcacggtatgccctagaccaccgatctctatcattgagaactcggtggattttttccaggatcctatagaggtgggattgaatgtttagatacatgggcattaggccgtctttggggtggagatagctccattgaagggattcatgctccggggtagtgttgtaaatcacccagtcataacaaggtcgcagtgcatggtgttgcacaatatcttttagaagtaggctgattgccacagataagcccttggtgtaggtgtttacaaaccggttgagctgggatgggtgcattcggggtgaaattatgtgcattttggattggatttttaagttggcaatattgccgccaagatcccgtcttgggttcatgttatgaaggaccaccaagacggtgtatccggtacatttaggaaatttatcgtgcagcttggatggaaaagcgtggaaaaatttggagacacccttgtgtcctccaagattttccatgcactcatccatgataatagcaatggggccgtgggcagcggcgcgggcaaacacgttccgtgggtctgacacatcatagttatgttcctgagttaaatcatcataagccattttaatgaatttggggcggagagtaccagattggggtatgaatgttccttcgggccccggagcatagttcccctcacagatttgcatttcccaagctttcagttccgagggtggaatcatgtccacctggggggctatgaaaaacaccgtttctggggcgggggtgattaattgtgatgatagcaaatttctgagcaattgagatttgccacatccggtggggccataaatgattccgattacgggttgcaggtggtagtttagggaacggcaactgccgtcttctcgaagcaagggggccacctcgttcatcatttcccttacatgcatattttcccgcaccaaatccattaggaggcgctctcctcctagtgatagaagttcttgtagtgaggaaaagtttttcagcggtttcagaccgtcagccatgggcattttggagagagtttgctgcaaaagttctagtctgttccacagttcagtgatgtgttctatggcatctcgatccagcagacctcctcgtttcgcgggtttggacggctcctggaatagggtatgagacgatgggcgtccagcgctgccagggttcggtccttccagggtctcagtgttcgagtcagggttgtttccgtcacagtgaaggggtgtgcgcctgcttgggcgcttgccagggtgcgcttcagactcatcctgctggtcgaaaacttctgtcgcttggcgccctgtatgtcggccaagtagcagtttaccatgagttcgtagttgagcgcctcggctgcgtggcctttggcgcggagcttacctttggaagttttcttgcataccgggcagtataggcatttcagcgcatacaacttgggcgcaaggaaaacggattctggggagtatgcatctgcgccgcaggaggcgcaaacagtttcacattccaccagccaggttaaatccggttcattggggtcaaaaacaagttttccgccatattttttgatgcgtttcttacctttggtctccatgagttcgtgtcctcgttgagtgacaaacaggctgtccgtgtccccgtagactgattttacaggcctcttctccagtggagtgcctcggtcttcttcgtacaggaactctgaccactctgatacaaaggcgcgcgtccaggccagcacaaaggaggctatgtgggaggggtagcgatcgttgtcaaccagggggtccaccttttccaaagtatgcaaacacatgtcaccctcttcaacatccaggaatgtgattggcttgtaggtgtatttcacgtgacctggggtccccgctgggggggtataaaagggggcggttctttgctcttcctcactgtcttccggatcgctgtccaggaacgtcagctgttggggtaggtattccctctcgaaggcgggcatgacctctgcactcaggttgtcagtttctaagaacgaggaggatttgatattgacagtgccggttgagatgcctttcatgaggttttcgtccatctggtcagaaaacacaatttttttattgtcaagtttggtggcaaatgatccatacagggcgttggataaaagtttggcaatggatcgcatggtttggttcttttccttgtccgcgcgctctttggcggcgatgttgagttggacatactcgcgtgccaggcacttccattcggggaagatagttgttaattcatctggcacgattctcacttgccaccctcgattatgcaaggtaattaaatccacactggtggccacctcgcctcgaaggggttcattggtccaacagagcctacctcctttcctagaacagaaagggggaagtgggtctagcataagttcatcgggagggtctgcatccatggtaaagattcccggaagtaaatccttatcaaaatagctgatgggagtggggtcatctaaggccatttgccattctcgagctgccagtgcgcgctcatatgggttaaggggactgccccatggcatgggatgggtgagtgcagaggcatacatgccacagatgtcatagacgtagatgggatcctcaaagatgcctatgtaggttggatagcatcgcccccctctgatacttgctcgcacatagtcatatagttcatgtgatggcgctagcagccccggacccaagttggtgcgattgggtttttctgttctgtagacgatctggcgaaagatggcgtgagaattggaagagatggtgggtctttgaaaaatgttgaaatgggcatgaggtagacctacagagtctctgacaaagtgggcataagattcttgaagcttggttaccagttcggcggtgacaagtacgtctagggcgcagtagtcaagtgtttcttgaatgatgtcataacctggttggtttttcttttcccacagttcgcggttgagaaggtattcttcgcgatccttccagtactcttctagcggaaacccgtctttgtctgcacggtaagatcctagcatgtagaactgattaactgccttgtaagggcagcagcccttctctacgggtagagagtatgcttgagcagcttttcgtagcgaagcgtgagtaagggcaaaggtgtctctgaccatgactttgaggaattggtatttgaagtcgatgtcgtcacaggctccctgttcccagagttggaagtctacccgtttcttgtaggcggggttgggcaaagcgaaagtaacatcattgaagagaatcttgccggccctgggcatgaaattgcgagtgatgcgaaaaggctgtggtacttccgctcggttattgataacctgggcagctaggacgatctcgtcgaaaccgttgatgttgtgtcctacgatgtataattctatgaaacgcggcgtgcctctgacgtgaggtagcttactgagctcatcaaaggttaggtctgtggggtcagataaggcgtagtgttcgagagcccattcgtgcaggtgaggattcgctttaaggaaggaggaccagaggtccactgccagtgctgtttgtaactggtcccggtactgacgaaaatgccgtccgactgccattttttctggggtgacgcaatagaaggtttgggggtcctgccgccagcgatcccacttgagttttatggcgaggtcataggcgatgttgacgagccgctggtctccagagagtttcatgaccagcatgaaggggattagctgcttgccaaaggaccccatccaggtgtaggtttccacatcgtaggtgagaaagagcctttctgtgcgaggatgagagccaatcgggaagaactggatctcctgccaccagttggaggaatggctgttgatgtgatggaagtagaactccctgcgacgcgccgagcattcatgcttgtgcttgtacagacggccgcagtagtcgcagcgttgcacgggttgtatctcgtgaatgagttgtacctggcttcccttgacgagaaatttcagtgggaagccgaggcctggcgattgtatctcgtgctttactatgttgtctgcatcggcctgttcatcttctgtctcgatggtggtcatgctgacgagccctcgcgggaggcaagtccagacctcggcgcggcaggggcggagctcgaggacgagagcgcgcaggctggagctgtccagggtcctgagacgctgcggactcaggttagtaggcagtgtcaggagattaacttgcatgatcttttggagggcgtgcgggaggttcagatagtacttgatctcaacgggtccgttggtggagatgtcgatggcttgcagggttccgtgtcccttgggcgctaccaccgtgcccttgtttttcattttggacggcggtggctctgttgcttcttgcatgtttagaagcggtgtcgagggcgcgcaccgggcggcaggggcggctcgggacccggcggcatggctggcagtggtacgtcggcgccgcgcgcgggtaggttctggtactgcgccctgagaagactcgcatgcgcgacgacgcggcggttgacatcctggatctgacgcctctgggtgaaagctaccggccccgtgagcttgaacctgaaagagagttcaacagaatcaatctcggtatcgttgacggcggcttgcctaaggatttcttgcacgtcaccagagttgtcctggtaggcgatctccgccatgaactgctcgatctcttcctcttgaagatctccgcggcccgctctctcgacggtggccgcgaggtcgttggagatgcgcccaatgagttgagagaatgcattcatgcccgcctcgttccagacgcggctgtagaccacggcccccacgggatctctcgcgcgcatgaccacctgggcgaggttgagctccacgtggcgggtgaagaccgcatagttgcataggcgctggaaaaggtagttgagtgtggtggcgatgtgctcggtgacgaagaaatacatgatccatcgtctcagcggcatctcgctgacatcgcccagagcttccaagcgctccatggcctcgtagaagtccacggcaaaattaaaaaactgggagtttcgcgcggacacggtcaactcctcttccagaagacggataagttcggcgatggtggtgcgcacctcgcgctcgaaagcccctgggatttcttcctcaatctcttcttcttccactaacatctcttcctcttcaggtggggctgcaggaggagggggaacgcggcgacgccggcggcgcacgggcagacggtcgatgaatctttcaatgacctctccgcggcggcggcgcatggtttcagtgacggcgcggccgttctcgcgcggtcgcagagtaaaaacaccgccgcgcatctccttaaagtggtgactgggaggttctccgtttgggagggagagggcgctgattatacattttattaattggcccgtagggactgcacgcagagatctgatcgtgtcaagatccacgggatctgaaaacctttcgacgaaagcgtctaaccagtcacagtcacaaggtaggctgagtacggcttcttgtgggcgggggtggttatgtgttcggtctgggtcttctgtttcttcttcatctcgggaaggtgagacgatgctgctggtgatgaaattaaagtaggcagttctaagacggcggatggtggcgaggagcaccaggtctttgggtccggcttgctggatacgcaggcgattggccattccccaagcattatcctgacatctagcaagatctttgtagtagtcttgcatgagccgttctacgggcacttcttcctcacccgttctgccatgcatacgtgtgagtccaaatccgcgcattggttgtaccagtgccaagtcagctacgactctttcggcgaggatggcttgctgtacttgggtaagggtggcttgaaagtcatcaaaatccacaaagcggtggtaagctcctgtattaatggtgtaagcacagttggccatgactgaccagttaactgtctggtgaccagggcgcacgagctcggtgtatttaaggcgcgaataggcgcgggtgtcaaagatgtaatcgttgcaggtgcgcaccagatactggtaccctataagaaaatgcggcggtggttggcggtagagaggccatcgttctgtagctggagcgccaggggcgaggtcttccaacataaggcggtgatagccgtagatgtacctggacatccaggtgattcctgcggcggtagtagaagcccgaggaaactcgcgtacgcggttccaaatgttgcgtagcggcatgaagtagttcattgtaggcacggtttgaccagtgaggcgcgcgcagtcattgatgctctatagacacggagaaaatgaaagcgttcagcgactcgactccgtagcctggaggaacgtgaacgggttgggtcgcggtgtaccccggttcgagacttgtactcgagccggccggagccgcggctaacgtggtattggcactcccgtctcgacccagcctacaaaaatccaggatacggaatcgagtcgttttgctggtttccgaatggcagggaagtgagtcctattttttttttttgccgctcagatgcatcccgtgctgcgacagatgcgcccccaacaacagcccccctcgcagcagcagcagcagcaatcacaaaaggctgtccctgcaactactgcaactgccgccgtgagcggtgcgggacagcccgcctatgatctggacttggaagagggcgaaggactggcacgtctaggtgcgccttcacccgagcggcatccgcgagttcaactgaaaaaagattctcgcgaggcgtatgtgccccaacagaacctatttagagacagaagcggcgaggagccggaggagatgcgagcttcccgctttaacgcgggtcgtgagctgcgtcacggtttggaccgaagacgagtgttgcgggacgaggatttcgaagttgatgaaatgacagggatcagtcctgccagggcacacgtggctgcagccaaccttgtatcggcttacgagcagacagtaaaggaagagcgtaacttccaaaagtcttttaataatcatgtgcgaaccctgattgcccgcgaagaagttacccttggtttgatgcatttgtgggatttgatggaagctatcattcagaaccctactagcaaacctctgaccgcccagctgtttctggtggtgcaacacagcagagacaatgaggctttcagagaggcgctgctgaacatcaccgaacccgaggggagatggttgtatgatcttatcaacattctacagagtatcatagtgcaggagcggagcctgggcctggccgagaaggtggctgccatcaattactcggttttgagcttgggaaaatattacgctcgcaaaatctacaagactccatacgttcccatagacaaggaggtgaagatagatgggttctacatgcgcatgacgctcaaggtcttgaccctgagcgatgatcttggggtgtatcgcaatgacagaatgcatcgcgcggttagcgccagcaggaggcgcgagttaagcgacagggaactgatgcacagtttgcaaagagctctgactggagctggaaccgagggtgagaattacttcgacatgggagctgacttgcagtggcagcctagtcgcagggctctgagcgccgcgacggcaggatgtgagcttccttacatagaagaggcggatgaaggcgaggaggaagagggcgagtacttggaagactgatggcacaacccgtgttttttgctagatggaacagcaagcaccggatcccgcaatgcgggcggcgctgcagagccagccgtccggcattaactcctcggacgattggacccaggccatgcaacgtatcatggcgttgacgactcgcaaccccgaagcctttagacagcaaccccaggccaaccgtctatcggccatcatggaagctgtagtgccttcccgctctaatcccactcatgagaaggtcctggccatcgtgaacgcgttggtggagaacaaagctattcgtccagatgaggccggactggtatacaacgctctcttagaacgcgtggctcgctacaacagtagcaatgtgcaaaccaatttggaccgtatgataacagatgtacgcgaagccgtgtctcagcgcgaaaggttccagcgtgatgccaacctgggttcgctggtggcgttaaatgctttcttgagtactcagcctgctaatgtgccgcgtggtcaacaggattatactaactttttaagtgctttgagactgatggtatcagaagtacctcagagcgaagtgtatcagtccggtcctgattacttctttcagactagcagacagggcttgcagacggtaaatctgagccaagcttttaaaaaccttaaaggtttgtggggagtgcatgccccggtaggagaaagagcaaccgtgtctagcttgttaactccgaactcccgcctattattactgttggtagctcctttcaccgacagcggtagcatcgaccgtaattcctatttgggttacctactaaacctgtatcgcgaagccatagggcaaagtcaggtggacgagcagacctatcaagaaattacccaagtcagtcgcgctttgggacaggaagacactggcagtttggaagccactctgaacttcttgcttaccaatcggtctcaaaagatccctcctcaatatgctcttactgcggaggaggagaggatccttagatatgtgcagcagagcgtgggattgtttctgatgcaagagggggcaactccgactgcagcactggacatgacagcgcgaaatatggagcccagcatgtatgccagtaaccgacctttcattaacaaactgctggactacttgcacagagctgccgctatgaactctgattatttcaccaatgccatcttaaacccgcactggctgcccccacctggtttctacacgggcgaatatgacatgcccgaccctaatgacggatttctgtgggacgacgtggacagcgatgttttttcacctctttctgatcatcgcacgtggaaaaaggaaggcggcgatagaatgcattcttctgcatcgctgtccggggtcatgggtgctaccgcggctgagcccgagtctgcaagtccttttcctagtctacccttttctctacacagtgtacgtagcagcgaagtgggtagaataagtcgcccgagtttaatgggcgaagaggagtatctaaacgattccttgctcagaccggcaagagaaaaaaatttcccaaacaatggaatagaaagtttggtggataaaatgagtagatggaagacttatgctcaggatcacagagacgagcctgggatcatggggattacaagtagagcgagccgtagacgccagcgccatgacagacagaggggtcttgtgtgggacgatgaggattcggccgatgatagcagcgtgctggacttgggtgggagaggaaggggcaacccgtttgctcatttgcgccctcgcttgggtggtatgttgtaaaaaaaaataaaaaaaaaactcaccaaggccatggcgacgagcgtacgttcgttcttctttattatctgtgtctagtataatgaggcgagtcgtgctaggcggagcggtggtgtatccggagggtcctcctccttcgtacgagagcgtgatgcagcagcagcaggcgacggcggtgatgcaatccccactggaggctccctttgtgcctccgcgatacctggcacctacggagggcagaaacagcattcgttattcggaactggcacctcagtacgataccaccaggttgtatctggtggacaacaagtcggcggacattgcttctctgaactatcagaatgaccacagcaacttcttgaccacggtggtgcaaaacaatgactttacccctacggaagccagcacccagaccattaactttgatgaacgatcgcggtggggcggtcagctaaagaccatcatgcatactaacatgccaaacgtgaacgagtatatgtttagtaacaagttcaaagcgcgtgtgatggtgtccagaaaacctcccgacggtgctgcagttggggatacttatgatcacaagcaggatattttgaaatatgagtggttcgagtttactttgccagaaggcaacttttcagttactatgactattgatttgatgaacaatgccatcatagataattacttgaaagtgggtagacagaatggagtgcttgaaagtgacattggtgttaagttcgacaccaggaacttcaagctgggatgggatcccgaaaccaagttgatcatgcctggagtgtatacgtatgaagccttccatcctgacattgtcttactgcctggctgcggagtggattttaccgagagtcgtttgagcaaccttcttggtatcagaaaaaaacagccatttcaagagggttttaagattttgtatgaagatttagaaggtggtaatattccggccctcttggatgtagatgcctatgagaacagtaagaaagaacaaaaagccaaaatagaagctgctacagctgctgcagaagctaaggcaaacatagttgccagcgactctacaagggttgctaacgctggagaggtcagaggagacaattttgcgccaacacctgttccgactgcagaatcattattggccgatgtgtctgaaggaacggacgtgaaactcactattcaacctgtagaaaaagatagtaagaatagaagctataatgtgttggaagacaaaatcaacacagcctatcgcagttggtatctttcgtacaattatggcgatcccgaaaaaggagtgcgttcctggacattgctcaccacctcagatgtcacctgcggagcagagcaggtctactggtcgcttccagacatgatgaaggatcctgtcactttccgctccactagacaagtcagtaactaccctgtggtgggtgcagagcttatgcccgtcttctcaaagagcttctacaacgaacaagctgtgtactcccagcagctccgccagtccacctcgcttacgcacgtcttcaaccgctttcctgagaaccagattttaatccgtccgccggcgcccaccattaccaccgtcagtgaaaacgttcctgctctcacagatcacgggaccctgccgttgcgcagcagtatccggggagtccaacgtgtgaccgttactgacgccagacgccgcacctgtccctacgtgtacaaggcactgggcatagtcgcaccgcgcgtcctttcaagccgcactttctaaaaaaaaaaaaaatgtccattcttatctcgcccagtaataacaccggttggggtctgcgcgctccaagcaagatgtacggaggcgcacgcaaacgttctacccaacatcctgtccgtgttcgcggacattttcgcgctccatggggcgccctcaagggccgcactcgcgttcgaaccaccgtcgatgatgtaatcgatcaggtggttgccgacgcccgtaattatactcctactgcgcctacatctactgtggatgcagttattgacagtgtagtggctgacgctcgcaactatgctcgacgtaagagccggcgaaggcgcattgccagacgccaccgagctaccactgccatgcgagccgcaagagctctgctacgaagagctagacgcgtggggcgaagagccatgcttagggcggccagacgtgcagcttcgggcgccagcgccggcaggtcccgcaggcaagcagccgctgtcgcagcggcgactattgccgacatggcccaatcgcgaagaggcaatgtatactgggtgcgtgacgctgccaccggtcaacgtgtacccgtgcgcacccgtccccctcgcacttagaagatactgagcagtctccgatgttgtgtcccagcggcgaggatgtccaagcgcaaatacaaggaagaaatgctgcaggttatcgcacctgaagtctacggccaaccgttgaaggatgaaaaaaaaccccgcaaaatcaagcgggttaaaaaggacaaaaaagaagaggaagatggcgatgatgggctggcggagtttgtgcgcgagtttgccccacggcgacgcgtgcaatggcgtgggcgcaaagttcgacatgtgttgagacctggaacttcggtggtctttacacccggcgagcgttcaagcgctacttttaagcgttcctatgatgaggtgtacggggatgatgatattcttgagcaggcggctgaccgattaggcgagtttgcttatggcaagcgtagtagaataacttccaaggatgagacagtgtcgatacccttggatcatggaaatcccacccctagtcttaaaccggtcactttgcagcaagtgttacccgtaactccgcgaacaggtgttaaacgcgaaggtgaagatttgtatcccactatgcaactgatggtacccaaacgccagaagttggaggacgttttggagaaagtaaaagtggatccagatattcaacctgaggttaaagtgagacccattaagcaggtagcgcctggtctgggggtacaaactgtagacattaagattcccactgaaagtatggaagtgcaaactgaacccgcaaagcctactgccacctccactgaagtgcaaacggatccatggatgcccatgcctattacaactgacgccgccggtcccactcgaagatcccgacgaaagtacggtccagcaagtctgttgatgcccaattatgttgtacacccatctattattcctactcctggttaccgaggcactcgctactatcgcagccgaaacagtacctcccgccgtcgccgcaagacacctgcaaatcgcagtcgtcgccgtagacgcacaagcaaaccgactcccggcgccctggtgcggcaagtgtaccgcaatggtagtgcggaacctttgacactgccgcgtgcgcgttaccatccgagtatcatcacttaatcaatgttgccgctgcctccttgcagatatggccctcacttgtcgccttcgcgttcccatcactggttaccgaggaagaaactcgcgccgtagaagagggatgttgggacgcggaatgcgacgctacaggcgacggcgtgctatccgcaagcaattgcggggtggttttttaccagccttaattccaattatcgctgctgcaattggcgcgataccaggcatagcttccgtggcggttcaggcctcgcaacgacattgacattggaaaaaaacgtataaataaaaaaaaaaaaatacaatggactctgacactcctggtcctgtgactatgttttcttagagatggaagacatcaatttttcatccttggctccgcgacacggcacgaagccgtacatgggcacctggagcgacatcggcacgagccaactgaacgggggcgccttcaattggagcagtatctggagcgggcttaaaaattttggctcaaccataaaaacatacgggaacaaagcttggaacagcagtacaggacaggcgcttagaaataaacttaaagaccagaacttccaacaaaaagtagtcgatgggatagcttccggcatcaatggagtggtagatttggctaaccaggctgtgcagaaaaagataaacagtcgtttggacccgccgccagcaaccccaggtgaaatgcaagtggaggaagaaattcctccgccagaaaaacgaggcgacaagcgtccgcgtcccgatttggaagagacgctggtgacgcgcgtagatgaaccgccttcttatgaggaagcaacgaagcttggaatgcccaccactagaccgatagccccaatggccaccggggtgatgaaaccttctcagttgcatcgacccgtcaccttggatttgccccctccccctgctgctactgctgtacccgcttctaagcctgtcgctgccccgaaaccagtcgccgtagccaggtcacgtcccgggggcgctcctcgtccaaatgcgcactggcaaaatactctgaacagcatcgtgggtctaggcgtgcaaagtgtaaaacgccgtcgctgcttttaattaaatatggagtagcgcttaacttgcctatctgtgtatatgtgtcattacacgccgtcacagcagcagaggaaaaaaggaagaggtcgtgcgtcgacgctgagttactttcaagatggccaccccatcgatgctgccccaatgggcatacatgcacatcgccggacaggatgcttcggagtacctgagtccgggtctggtgcagttcgcccgcgccacagacacctacttcaatctgggaaataagtttagaaatcccaccgtagcgccgacccacgatgtgaccaccgaccgtagccagcggctcatgttgcgcttcgtgcccgttgaccgggaggacaatacatactcttacaaagtgcggtacaccctggccgtgggcgacaacagagtgctggatatggccagcacgttctttgacattaggggtgtgttggacagaggtcccagtttcaaaccctattctggtacggcttacaactccctggctcctaaaggcgctccaaatacatctcagtggattgcagaaggtgtaaaaaatacaactggtgaggaacacgtaacagaagaggaaaccaatactactacttacacttttggcaatgctcctgtaaaagctgaagctgaaattacaaaagaaggactcccagtaggtttggaagtttcagatgaagaaagtaaaccgatttatgctgataaaacatatcagccagaacctcagctgggagatgaaacttggactgaccttgatggaaaaaccgaaaagtatggaggcagggctctcaaacccgatactaagatgaaaccatgctacgggtcctttgccaaacctactaatgtgaaaggcggtcaggcaaaacaaaaaacaacggagcagccaaatcagaaagtcgaatatgatatcgacatggagttttttgatgcggcatcgcagaaaacaaacttaagtcctaaaattgtcatgtatgcagaaaatgtaaatttggaaactccagacactcatgtagtgtacaaacctggaacagaagacacaagttccgaagctaatttgggacaacaatctatgcccaacagacccaactacattggcttcagagataactttattggacttatgtactataacagtactggtaacatgggggtgctggctggtcaagcgtctcagttaaatgcagtggttgacttgcaggacagaaacacagaactttcttaccaactcttgcttgactctctgggcgacagaaccagatactttagcatgtggaatcaggctgtggacagttatgatcctgatgtacgtgttattgaaaatcatggtgtggaagatgaacttcccaactactgttttccactggacggcataggtgttccaacaaccagttacaaatcaatagttccaaatggagacaatgcgcctaattggaaggaacctgaagtaaatggaacaagtgagatcggacagggtaatttgtttgccatggaaattaaccttcaagccaatctatggcgaagtttcctttattccaatgtggctctatatctcccagactcgtacaaatacaccccgtccaatgtcactcttccagaaaacaaaaacacctacgactacatgaacgggcgggtggtgccgccatctctagtagacacctatgtgaacattggtgccaggtggtctctggatgccatggacaatgtcaacccattcaaccaccaccgtaacgctggcttgcgttaccgatccatgcttctgggtaacggacgttatgtgcctttccacatacaagtgcctcaaaaattcttcgctgttaaaaacctgctgcttctcccaggctcctacacttatgagtggaactttaggaaggatgtgaacatggttctacagagttccctcggtaacgacctgcgggtagatggcgccagcatcagtttcacgagcatcaacctctatgctacttttttccccatggctcacaacaccgcttccacccttgaagccatgctgcggaatgacaccaatgatcagtcattcaacgactacctatctgcagctaacatgctctaccccattcctgccaatgcaaccaatattcccatttccattccttctcgcaactgggcggctttcagaggctggtcatttaccagactgaaaaccaaagaaactccctctttggggtctggatttgacccctactttgtctattctggttctattccctacctggatggtaccttctacctgaaccacacttttaagaaggtttccatcatgtttgactcttcagtgagctggcctggaaatgacaggttactatctcctaacgaatttgaaataaagcgcactgtggatggcgaaggctacaacgtagcccaatgcaacatgaccaaagactggttcttggtacagatgctcgccaactacaacatcggctatcagggcttctacattccagaaggatacaaagatcgcatgtattcatttttcagaaacttccagcccatgagcaggcaggtggttgatgaggtcaattacaaagacttcaaggccgtcgccataccctaccaacacaacaactctggctttgtgggttacatggctccgaccatgcgccaaggtcaaccctatcccgctaactatccctatccactcattggaacaactgccgtaaatagtgttacgcagaaaaagttcttgtgtgacagaaccatgtggcgcataccgttctcgagcaacttcatgtctatgggggcccttacagacttgggacagaatatgctctatgccaactcagctcatgctctggacatgacctttgaggtggatcccatggatgagcccaccctgctttatcttctcttcgaagttttcgacgtggtcagagtgcatcagccacaccgcggcatcatcgaggcagtctacctgcgtacaccgttctcggccggtaacgctaccacgtaagaagcttcttgcttcttgcaaatagcagctgcaaccatggcctgcggatcccaaaacggctccagcgagcaagagctcagagccattgtccaagacctgggttgcggaccctattttttgggaacctacgataagcgcttcccggggttcatggcccccgataagctcgcctgtgccattgtaaatacggccggacgtgagacggggggagagcactggttggctttcggttggaacccacgttctaacacctgctacctttttgatccttttggattctcggatgatcgtctcaaacagatttaccagtttgaatatgagggtctcctgcgccgcagcgctcttgctaccaaggaccgctgtattacgctggaaaaatctacccagaccgtgcagggtccccgttctgccgcctgcggacttttctgctgcatgttccttcacgcctttgtgcactggcctgaccgtcccatggacggaaaccccaccatgaaattgctaactggagtgccaaacaacatgcttcattctcctaaagtccagcccaccctgtgtgacaatcaaaaagcactctaccattttcttaatacccattcgccttattttcgctcccatcgtacacacatcgaaagggccactgcgttcgaccgtatggatgttcaataatgactcatgtaaacaacgtgttcaataaacatcactttatttttttacatgtatcaaggctctgcattacttatttatttacaagtcgaatgggttctgacgagaatcagaatgacccgcaggcagtgatacgttgcggaactgatacttgggttgccacttgaattcgggaatcaccaacttgggaaccggtatatcgggcaggatgtcactccacagctttctggtcagctgcaaagctccaagcaggtcaggagccgaaatcttgaaatcacaattaggaccagtgctttgagcgcgagagttgcggtacaccggattgcagcactgaaacaccatcagcgacggatgtctcacgcttgccagcacggtgggatctgcaatcatgcccacatccagatcttcagcattggcaatgctgaacggggtcatcttgcaggtctgcctacccatggcgggcacccaattaggcttgtggttgcaatcgcagtgcagggggatcagtatcatcttggcctgatcctgtctgattcctggatacacggctctcatgaaagcatcatattgcttgaaagcctgctgggctttactaccctcggtataaaacatcccgcaggacctgctcgaaaactggttagctgcacagccggcatcattcacacagcagcgggcgtcattgttagctatttgcaccacacttctgccccagcggttttgggtgattttggttcgctcgggattctcctttaaggctcgttgtccgttctcgctggccacatccatctcgataatctgctccttctgaatcataatattgccatgcaggcacttcagcttgccctcataatcattgcagccatgaggccacaacgcacagcctgtacattcccaattatggtgggcgatctgagaaaaagaatgtatcattccctgcagaaatcttcccatcatcgtgctcagtgtcttgtgactagtgaaagttaactggatgcctcggtgctcctcgtttacgtactggtgacagatgcgcttgtattgttcgtgttgctcaggcattagtttaaaagaggttctaagttcgttatccagcctgtacttctccatcagcagacacatcacttccatgcctttctcccaagcagacaccaggggcaagctaatcggattcttaacagtgcaggcagcagctcctttagccagagggtcatctttagcgatcttctcaatgcttcttttgccatccttctcaacgatgcgcacgggcgggtagctgaaacccactgctacaagttgcgcctcttctctttcttcttcgctgtcttgactgatgtcttgcatggggatatgtttggtcttccttggcttctttttggggggtatcggaggaggaggactgtcgctccgttccggagacagggaggattgtgacgtttcgctcaccattaccaactgactgtcggtagaagaacctgaccccacacggcgacaggtgtttctcttcgggggcagaggtggaggcgattgcgaagggctgcggtccgacctggaaggcggatgactggcagaaccccttccgcgttcgggggtgtgctccctgtggcggtcgcttaactgatttccttcgcggctggccattgtgttctcctaggcagagaaacaacagacatggaaactcagccattgctgtcaacatcgccacgagtgccatcacatctcgtcctcagcgacgaggaaaaggagcagagcttaagcattccaccgcccagtcctgccaccacctctaccctagaagataaggaggtcgacgcatctcatgacatgcagaataaaaaagcgaaagagtctgagacagacatcgagcaagacccgggctatgtgacaccggtggaacacgaggaagagttgaaacgctttctagagagagaggatgaaaactgcccaaaacaacgagcagataactatcaccaagatgctggaaatagggatcagaacaccgactacctcatagggcttgacggggaagacgcgctccttaaacatctagcaagacagtcgctcatagtcaaggatgcattattggacagaactgaagtgcccatcagtgtggaagagctcagccgcgcctacgagcttaacctcttttcacctcgtactccccccaaacgtcagccaaacggcacctgcgagccaaatcctcgcttaaacttttatccagcttttgctgtgccagaagtactggctacctatcacatcttttttaaaaatcaaaaaattccagtctcctgccgcgctaatcgcacccgcgccgatgccctactcaatctgggacctggttcacgcttacctgatatagcttccttggaagaggttccaaagatcttcgagggtctgggcaataatgagactcgggccgcaaatgctctgcaaaagggagaaaatggcatggatgagcatcacagcgttctggtggaattggaaggcgataatgccagactcgcagtactcaagcgaagcatcgaggtcacacacttcgcatatcccgctgtcaacctgccccctaaagtcatgacggcggtcatggaccagttactcattaagcgcgcaagtcccctttcagaagacatgcatgacccagatgcctgtgatgagggtaaaccagtggtcagtgatgagcagctaacccgatggctgggcaccgactctcccagggatttggaagagcgtcgcaagcttatgatggccgtggtgctggttaccgtagaactagagtgtctccgacgtttctttaccgattcagaaaccttgcgcaaactcgaagagaatctgcactacacttttagacacggctttgtgcggcaggcatgcaagatatctaacgtggaactcaccaacctggtttcctacatgggtattctgcatgagaatcgcctaggacaaagcgtgctgcacagcaccctgaagggggaagcccgccgtgattacatccgcgattgtgtctatctgtacctgtgccacacgtggcaaaccggcatgggtgtatggcagcaatgtttagaagaacagaacttgaaagagcttgacaagctcttacagaaatctcttaaggttctgtggacagggttcgacgagcgcaccgtcgcttccgacctggcagacctcatcttcccagagcgtctcagggttactttgcgaaacggattgcctgactttatgagccagagcatgcttaacaattttcgctctttcatcctggaacgctccggtatcctgcccgccacctgctgcgcactgccctccgactttgtgcctctcacctaccgcgagtgccccccgccgctatggagtcactgctacctgttccgtctggccaactatctctcctaccactcggatgtgatcgaggatgtgagcggagacggcttgctggagtgtcactgccgctgcaatctgtgcacgccccaccggtccctagcttgcaacccccagttgatgagcgaaacccagataataggcacctttgaattgcaaggccccagcagccaaggcgatgggtcttctcctgggcaaagtttaaaactgaccccgggactgtggacctccgcctacttgcgcaagtttgctccggaagattaccacccctatgaaatcaagttctatgaggaccaatcacagcctccaaaggccgaactttcggcctgcgtcatcacccagggggcaattctggcccaattgcaagccatccaaaaatcccgccaagaatttctactgaaaaagggtaagggggtctaccttgacccccagaccggcgaggaactcaacacaaggttccctcaggatgtcccaacgacgagaaaacaagaagttgaaggtgcagccgccgcccccagaagatatggaggaagattgggacagtcaggcagaggaggcggaggaggacagtctggaggacagtctggaggaagacagtttggaggaggaaaacgaggaggcagaggaggtggaagaagtaaccgccgacaaacagttatcctcggctgcggagacaagcaacagcgctaccatctccgctccgagtcgaggaacccggcggcgtcccagcagtagatgggacgagaccggacgcttcccgaacccaaccagcgcttccaagaccggtaagaaggatcggcagggatacaagtcctggcgggggcataagaatgccatcatctcctgcttgcatgagtgcgggggcaacatatccttcacgcggcgctacttgctattccaccatggggtgaactttccgcgcaatgttttgcattactaccgtcacctccacagcccctactatagccagcaaatcccggcagtctcgacagataaagacagcggcggcgacctccaacagaaaaccagcagcggcagttagaaaatacacaacaagtgcagcaacaggaggattaaagattacagccaacgagccagcgcaaacccgagagttaagaaatcggatctttccaaccctgtatgccatcttccagcagagtcggggtcaagagcaggaactgaaaataaaaaaccgatctctgcgttcgctcaccagaagttgtttgtatcacaagagcgaagatcaacttcagcgcactctcgaggacgccgaggctctcttcaacaagtactgcgcgctgactcttaaagagtaggcagcgaccgcgcttattcaaaaaaggcgggaattacatcatcctcgacatgagtaaagaaattcccacgccttacatgtggagttatcaaccccaaatgggattggcggcaggcgcctcccaggactactccacccgcatgaattggctcagcgccgggccttctatgatttctcgagttaatgatatacgcgcctaccgaaaccaaatacttttggaacagtcagctcttaccaccacgccccgccaacaccttaatcccagaaattggcccgccgccctagtgtaccaggaaagtcccgctcccaccactgtattacttcctcgagacgcccaggccgaagtccaaatgactaatgcaggtgcgcagttagctggcggctccaccctatgtcgtcacaggcctcggcataatataaaacgcctgatgatcagaggccgaggtatccagctcaacgacgagtcggtgagctctccgcttggtctacgaccagacggaatctttcagattgccggctgcgggagatcttccttcacccctcgtcaggctgttctgactttggaaagttcgtcttcgcaaccccgctcgggcggaatcgggaccgttcaatttgtggaggagtttactccctctgtctacttcaaccccttctccggatctcctgggcattacccggacgagttcataccgaacttcgacgcgattagcgagtcagtggacggctacgattgatgtctggtgacgcggctgagctatctcggctgcgacatctagaccactgccgccgctttcgctgctttgcccgggaactcattgagttcatctacttcgaactccccaaggatcaccctcaaggtccggcccacggagtgcggatttctatcgaaggcaaaatagactctcgcctgcaacgaattttctcccagcggcccgtgctgatcgagcgagaccagggaaacaccacggtttccatctactgcatttgtaatcaccccggattgcatgaaagcctttgctgtcttatgtgtactgagtttaataaaaactgaattaagactctcctacggactgccgcttcttcaacccggattttacaaccagaagaacgaaacttttcctgtcgtccaggactctgttaacttcacctttcctactcacaaactagaagctcaacgactacaccgcttttccagaagcattttccctactaatactactttcaaaaccggaggtgagctccaaggtcttcctacagaaaacccttgggtggaagcgggccttgtagtgctaggaattcttgcgggtgggcttgtgattattctttgctacctatacacaccttgcttcactttcttagtggtgttgtggtattggtttaaaaaatggggcccatactagtcttgcttgttttactttcgcttttggaaccgggttctgccaattacgatccatgtctagacttcgacccagaaaactgcacacttacttttgcacccgacacaagccgcatctgtggagttcatcgcctctcttacgaacttggcccccaacgacaaaaatttacctgcatggtgggaatcaaccccatagttatcacccagcaaagtggagatactaagggttgcattcactgctcctgcgattccatcgagtgcacctacaccctgctgaagaccctatgcggcctaagagacctgctaccaatgaattaaaaaatgattaataaaaaatcacttacttgaaatcagcaataaggtctctgttgaaattttctcccagcagcacctcacttccctcttcccaactctggtattctaaaccccgttcagcggcatactttctccatactttaaaggggatgtcaaattttagctcctctcctgtacccacaatcttcatgtctttcttcccagatgaccaagagagtccggctcagtgactccttcaaccctgtctacccctatgaagatgaaagcacctcccaacacccctttataaacccagggtttatttccccaaatggcttcacacaaagcccaaacggagttcttactttaaaatgtttaaccccactaacaaccacaggcggatctctacagctaaaagtgggagggggacttacagtggatgacaccaacggttttttgaaagaaaacataagtgccaccacaccactcgttaagactggtcactctataggtttaccactaggagccggattgggaacgaatgaaaataaactttgtatcaaattaggacaaggacttacattcaattcaaacaacatttgcattgatgacaatattaacaccttatggacaggagtcaaccccaccgaagccaactgtcaaatcatgaactccagtgaatctaatgattgcaaattaattctaacactagttaaaactggagcactagtcactgcatttgtttatgttataggagtatctaacaattttaatatgctaactacacacagaaatataaattttactgcagagctgtttttcgattctactggtaatttactaactagactctcatccctcaaaactccacttaatcataaatcaggacaaaacatggctactggtgccattactaatgctaaaggtttcatgcccagcacgactgcctatcctttcaatgataattctagagaaaaagaaaactacatttacggaacttgttactacacagctagtgatcgcactgcttttcccattgacatatctgtcatgcttaaccgaagagcaataaatgacgagacatcatattgtattcgtataacttggtcctggaacacaggagatgccccagaggtgcaaacctctgctacaaccctagtcacctccccatttaccttttactacatcagagaagacgactgacaaataaagtttgcgatcgccaggcccaccatggactggacctggcgcatcctgttcttggtggcagctgctacgggagctcattccaactgggtgaatgtaataagtgatttgaaaaaaattgaagatcttattcaatctatgcatattgatgctactttatatacggaaagtgatgttcaccccagttgcaaagtaacagcaatgaagtgctttctcttggagttacaagttatttcacttgagtccggagatgcaagtattcatgatacagtagaaaatctgatcatcctagcaaacaacagtttgtcttctaatgggaatgtaacagaatctggatgcaaagaatgtgaggaactggaggaaaaaaatattaaagaatttttgcagagttttgtacatattgtccaaatgttcatcaacacttctggaagcggagctactaacttcagcctgctgaagcaggctggagacgtggaggagaaccctggacctgctcagtcactggctctgagcctccttatcctggttctggcctttggcatccccaggacccaaggcagtgatggaggggctcaggactgttgcctcaagtacagccaaaggaagattcccgccaaggttgtccgcagctaccggaagcaggaaccaagcttaggctgctccatcccagctatcctgttcttgccccgcaagcgctctcaggcagagctatgtgcagacccaaaggagctctgggtgcagcagctgatgcagcatctggacaagacaccatccccacagaaaccagcccagggctgcaggaaggacaggggggcctccaagactggcaagaaaggaaagggctccaaaggctgcaagaggactgagcggtcacagacccctaaagggccaggaagcggagagggcagaggaagtctgctaacatgcggtgacgtcgaggagaatcctggacctgccttgacctttgctttactggtggccctcctggtgctcagctgcaagtcaagctgctctgtgggctgtgatctgcctcaaacccacagcctgggtagcaggaggaccttgatgctcctggcacagatgaggagaatctctcttttctcctgcttgaaggacagacatgactttggatttccccaggaggagtttggcaaccagttccaaaaggctgaaaccatccctgtcctccatgagatgatccagcagatcttcaatctcttcagcacaaaggactcatctgctgcttgggatgagaccctcctagacaaattctacactgaactctaccagcagctgaatgacctggaagcctgtgtgatacagggggtgggggtgacagagactcccctgatgaaggaggactccattctggctgtgaggaaatacttccaaagaatcactctctatctgaaagagaagaaatacagcccttgtgcctgggaggttgtcagagcagaaatcatgagatctttttctttgtcaacaaacttgcaagaaagtttaagaagtaaggaaggaagcggacagtgtactaattatgctctcttgaaattggctggagatgttgagagcaaccctggacctaagaaaagtggtgttcttttcctcttgggcatcatcttgctggttctgattggagtgcaaggaaccccagtagtgagaaagggtcgctgttcctgcatcagcaccaaccaagggactatccacctacaatccttgaaagaccttaaacaatttgccccaagcccttcctgcgagaaaattgaaatcattgctacactgaagaatggagttcaaacatgtctaaacccagattcagcagatgtgaaggaactgattaaaaagtgggagaaacaggtcagccaaaagaaaaagcaaaagaatgggaaaaaacatcaaaaaaagaaagttctgaaagttcgaaaatctcaacgttctcgtcaaaagaagactacaggaagcggagtgaaacagactttgaattttgaccttctcaagttggcgggagacgtggagtccaaccctggacctatgtgtcaccagcagttggtcatctcttggttttccctggtttttctggcatctcccctcgtggccatatgggaactgaagaaagatgtttatgtcgtagaattggattggtatccggatgcccctggagaaatggtggtcctcacctgtgacacccctgaagaagatggtatcacctggaccttggaccagagcagtgaggtcttaggctctggcaaaaccctgaccatccaagtcaaagagtttggagatgctggccagtacacctgtcacaaaggaggcgaggttctaagccattcgctcctgctgcttcacaaaaaggaagatggaatttggtccactgatattttaaaggaccagaaagaacccaaaaataagacctttctaagatgcgaggccaagaattattctggacgtttcacctgctggtggctgacgacaatcagtactgatttgacattcagtgtcaaaagcagcagaggctcttctgacccccaaggggtgacgtgcggagctgctacactctctgcagagagagtcagaggggacaacaaggagtatgagtactcagtggagtgccaggaggacagtgcctgcccagctgctgaggagagtctgcccattgaggtcatggtggatgccgttcacaagctcaagtatgaaaactacaccagcagcttcttcatcagggacatcatcaaacctgacccacccaagaacttgcagctgaagccattaaagaattctcggcaggtggaggtcagctgggagtaccctgacacctggagtactccacattcctacttctccctgacattctgcgttcaggtccagggcaagagcaagagagaaaagaaagatagagtcttcacggacaagacctcagccacggtcatctgccgcaaaaatgccagcattagcgtgcgggcccaggaccgctactatagctcatcttggagcgaatgggcatctgtgccctgcagtggagggggcggcagcgggggaggcggcagcggcggcgggggatcgagaaacctccccgtggccactccagacccaggaatgttcccatgccttcaccactcccaaaacctgctgagggccgtcagcaacatgctccagaaggccagacaaactctagaattttacccttgcacttctgaagagattgatcatgaagatatcacaaaagataaaaccagcacagtggaggcctgtttaccattggaattaaccaagaatgagagttgcctaaattccagagagacctctttcataactaatgggagttgcctggcctccagaaagacctcttttatgatggccctgtgccttagtagtatttatgaagacttgaagatgtaccaggtggagttcaagaccatgaatgcaaagcttctgatggatcctaagaggcagatctttctagatcaaaacatgctggcagttattgatgagctgatgcaggccctgaatttcaacagtgagactgtgccacaaaaatcctcccttgaagaaccggatttttataaaactaaaatcaagctctgcatacttcttcatgctttcagaattcgggcagtgactattgatagagtgatgagctatctgaatgcttcctaagctagcttgactgactgagatacagcgtaccttcagctcacagacatgataagatacattgatgagtttggacaaaccacaactagaatgcagtgaaaaaaatgctttatttgtgaaatttgtgatgctattgctttatttgtaaccattataagctgcaataaacaagttaacaacaacaattgcattcattttatgtttcaggttcagggggaggtgtgggaggttttttaaagcaagtaaaacctctacaaatgtggtagtcgtcagctatcctgcaggaacttgtttatttgaaaatcaattcacaaaatccgagtagttattttgcctcccccttcccatttaacagaatacaccaatctctccccacgcacagctttaaacatttggataccattagatatagacatggttttagattccacattccaaacagtttcagagcgagccaatctggggtcagtgatagataaaaatccatcgggatagtcttttaaagcgctttcacagtccaactgctgcggatgcgactccggagtctggatcacggtcatctggaagaagaacgatgggaatcataatccgaaaacggtatcggacgattgtgtctcatcaaacccacaagcagccgctgtctgcgtcgctccgtgcgactgctgtttatgggatcagggtccacagtgtcctgaagcatgattttaatagcccttaacatcaactttctggtgcgatgcgcgcagcaacgcattctgatttcactcaaatctttgcagtaggtacaacacattattacaatattgtttaataaaccataattaaaagcgctccagccaaaactcatatctgatataatcgcccctgcatgaccatcataccaaagtttaatataaattaaatgacgttccctcaaaaacacactacccacatacatgatctcttttggcatgtgcatattaacaatctgtctgtaccatggacaacgttggttaatcatgcaacccaatataaccttccggaaccacactgccaacaccgctcccccagccatgcattgaagtgaaccctgctgattacaatgacaatgaagaacccaattctctcgaccgtgaatcacttgagaatgaaaaatatctatagtggcacaacatagacataaatgcatgcatcttctcataatttttaactcctcaggatttagaaacatatcccagggaataggaagctcttgcagaacagtaaagctggcagaacaaggaagaccacgaacacaacttacactatgcatagtcatagtatcacaatctggcaacagcgggtggtcttcagtcatagaagctcgggtttcattttcctcacaacgtggtaactgggctctggtgtaagggtgatgtctggcgcatgatgtcgagcgtgcgcgcaaccttgtcataatggagttgcttcctgacattctcgtattttgtatagcaaaacgcggccctggcagaacacactcttcttcgccttctatcctgccgcttagcgtgttccgtgtgatagttcaagtacaaccacactcttaagttggtcaaaagaatgctggcttcagttgtaatcaaaactccatcgcatctaatcgttctgaggaaatcatccaagcaatgcaactggattgtgtttcaagcaggagaggagagggaagagacggaagaaccatgttaatttttattccaaacgatctcgcagtacttcaaattgtagatcgcgcagatggcatctctcgcccccactgtgttggtgaaaaagcacagctagatcaaaagaaatgcgattttcaaggtgctcaacggtggcttccagcaaagcctccacgcgcacatccaagaacaaaagaataccaaaagaaggagcattttctaactcctcaatcatcatattacattcctgcaccattcccagataattttcagctttccagccttgaattattcgtgtcagttcttgtggtaaatccaatccacacattacaaacaggtcccggagggcgccctccaccaccattcttaaacacaccctcataatgacaaaatatcttgctcctgtgtcacctgtagcgaattgagaatggcaacatcaattgacatgcccttggctctaagttcttctttaagttctagttgtaaaaactctctcatattatcaccaaactgcttagccagaagccccccgggaacaagagcaggggacgctacagtgcagtacaagcgcagacctccccaattggctccagcaaaaacaagattggaataagcatattgggaaccgccagtaatatcatcgaagttgctggaaatataatcaggcagagtttcttgtaaaaattgaataaaagaaaaatttgccaaaaaaacattcaaaacctctgggatgcaaatgcaataggttaccgcgctgcgctccaacattgttagttttgaattagtctgcaaaaataaaaaaaaaaacaagcgtcatatcatagtagcctgacgaacagatggataaatcagtctttccatcacaagacaagccacagggtctccagctcgaccctcgtaaaacctgtcatcatgattaaacaacagcaccgaaagttcctcgcggtgaccagcatgaataattcttgatgaagcatacaatccagacatgttagcatcagttaacgagaaaaaacagccaacatagcctttgggtataattatgcttaatcgtaagtatagcaaagccacccctcgcggatacaaagtaaaaggcacaggagaataaaaaatataattatttctctgctgctgttcaggcaacgtcgcccccggtccctctaaatacacatacaaagcctcatcagccatggcttaccagacaaagtacagcgggcacacaaagcacaagctctaaagtgactctccaacctctccacaatatatatatacacaagccctaaactgacgtaatgggagtaaagtgtaaaaaatcccgccaaacccaacacacaccccgaaactgcgtcaccagggaaaagtacagtttcacttccgcaatcccaacaggcgtaacttcctctttctcacggtacgtgatatcccactaacttgcaacgtcattttcccacggtcgcaccgccccttttagccgttaaccccacagccaatcaccacacgatccacactttttaaaatcacctcatttacatattggcaccattccatctataaggtatattatatagataga

SEQ ID NO: 95 - DNA, 36253 bp, Artificial Sequence
  Genome sequence of NG-752 virus
tctatctatataatataccttatagatggaatggtgccaatatgtaaatgaggtgattttaaaaagtgtggatcgtgtggtgattggctgtggggttaacggctaaaaggggcggtgcgaccgtgggaaaatgacgttttgtgggggtggagtttttttgcaagttgtcgcgggaaatgtgacgcataaaaaggcttttttctcacggaactacttagttttcccacggtatttaacaggaaatgaggtagttttgaccggatgcaagtgaaaattgttgattttcgcgcgaaaactgaatgaggaagtgtttttctgaataatgtggtatttatggcagggtggagtatttgttcagggccaggtagactttgacccattacgtggaggtttcgattaccgtgttttttacctgaatttccgcgtaccgtgtcaaagtcttctgtttttacgtaggtgtcagctgatcgctagggtatttatacctcagggtttgtgtcaagaggccactcttgagtgccagcgagaagagttttctcctctgcgccggcagtttaataataaaaaaatgagagatttgcgatttctgcctcaggaaataatctctgctgagactggaaatgaaatattggagcttgtggtgcacgccctgatgggagacgatccggagccacctgtgcagctttttgagcctcctacgcttcaggaactgtatgatttagaggtagagggatcggaggattctaatgaggaagctgtaaatggcttttttaccgattctatgcttttagctgctaatgaagggttagaattagatccgcctttggacacttttgatactccaggggtaattgtggaaagcggtacaggtgtaagaaaattacctgatttgagttccgtggactgtgatttgcactgctatgaagacgggtttcctccgagtgatgaggaggaccatgaaaaggagcagtccatgcagactgcagcgggtgagggagtgaaggctgccaatgttggttttcagttggattgcccggagcttcctggacatggctgtaagtcttgtgaatttcacaggaaaaatactggagtaaaggaactgttatgttcgctttgttatatgagaacgcactgccactttatttacagtaagtgtgtttaagttaaaatttaaaggaatatgctgtttttcacatgtatattgagtgtgagttttgtgcttcttattataggtcctgtgtctgatgctgatgaatcaccatctcctgattctactacctcacctcctgagattcaagcacctgttcctgtggacgtgcgcaagcccattcctgtgaagcttaagcctgggaaacgtccagcagtggaaaaacttgaggacttgttacagggtggggacggacctttggacttgagtacacggaaacgtccaagacaataagtgttccatatccgtgtttacttaaggtgacgtcaatatttgtgtgacagtgcaatgtaataaaaatatgttaactgttcactggtttttattgctttttgggcggggactcaggtatataagtagaagcagacctgtgtggttagctcataggagctggctttcatccatggaggtttgggccattttggaagaccttaggaagactaggcaactgttagagaacgcttcggacggagtctccggtttttggagattctggttcgctagtgaattagctagggtagtttttaggataaaacaggactataaacaagaatttgaaaagttgttggtagattgcccaggactttttgaagctcttaatttgggccatcaggttcactttaaagaaaaagttttatcagttttagacttttcaaccccaggtagaactgctgctgctgtggcttttcttacttttatattagataaatggatcccgcagactcatttcagcaggggatacgttttggatttcatagccacagcattgtggagaacatggaaggttcgcaagatgaggacaatcttaggttactggccagtgcagcctttgggtgtagcgggaatcctgaggcatccaccggtcatgccagcggttctggaggaggaacagcaagaggacaacccgagagccggcctggaccctccagtggaggaggcggagtagctgacttgtctcctgaactgcaacgggtgcttactggatctacgtccactggacgggataggggcgttaagagggagagggcatctagtggtactgatgctagatctgagttggctttaagtttaatgagtcgcagacgtcctgaaaccatttggtggcatgaggttcagaaagagggaagggatgaagtttctgtattgcaggagaaatattcactggaacaggtgaaaacatgttggttggagcctgaggatgattgggaggtggccattaaaaattatgccaagatagctttgaggcctgataaacagtataagattactagacggattaatatccggaatgcttgttacatatctggaaatggggctgaggtggtaatagatactcaagacaaggcagttattagatgctgcatgatggatatgtggcctggggtagtcggtatggaagcagtaacttttgtaaatgttaagtttaggggagatggttataatggaatagtgtttatggccaataccaaacttatattgcatggttgtagcttttttggtttcaacaatacctgtgtagatgcctggggacaggttagtgtacggggatgtagtttctatgcgtgttggattgccacagctggcagaaccaagagtcaattgtctctgaagaaatgcatatttcaaagatgtaacctgggcattctgaatgaaggcgaagcaagggtccgccactgcgcttctacagatactggatgttttattttgattaagggaaatgccagcgtaaagcataacatgatttgcggtgcttccgatgagaggccttatcaaatgctcacttgtgctggtgggcattgtaatatgctggctactgtgcatattgtttcccatcaacgcaaaaaatggcctgtttttgatcacaatgtgatgacgaagtgtaccatgcatgcaggtgggcgtagaggaatgtttatgccttaccagtgtaacatgaatcatgtgaaagtgttgttggaaccagatgccttttccagaatgagcctaacaggaatttttgacatgaacatgcaaatctggaagatcctgaggtatgatgatacgagatcgagggtacgcgcatgcgaatgcggaggcaagcatgccaggttccagccggtgtgtgtagatgtgactgaagatctcagaccggatcatttggttattgcccgcactggagcagagttcggatccagtggagaagaaactgactaaggtgagtattgggaaaactttggggtgggattttcagatggacagattgagtaaaaatttgttttttctgtcttgcagctgtcatgagtggaaacgcttcttttaaggggggagtcttcagcccttatctgacagggcgtctcccatcctgggcaggagttcgtcagaatgttatgggatctactgtggatggaagacccgtccaacccgccaattcttcaacgctgacctatgctactttaagttcttcacctttggacgcagctgcagctgccgccgccgcttctgttgccgctaacactgtgcttggaatgggttactatggaagcatcatggctaattccacttcctctaataacccttctaccctgactcaggacaagttacttgtccttttggcccagctggaggctttgacccaacgtctgggtgaactttctcagcaggtggtcgagttgcgagtacaaactgagtctgctgtcggcacggcaaagtctaaataaaaaaatcccagaatcaatgaataaataaacaagcttgttgttgatttaaaatcaagtgtttttatttcatttttcgcgcacggtatgccctagaccaccgatctctatcattgagaactcggtggattttttccaggatcctatagaggtgggattgaatgtttagatacatgggcattaggccgtctttggggtggagatagctccattgaagggattcatgctccggggtagtgttgtaaatcacccagtcataacaaggtcgcagtgcatggtgttgcacaatatcttttagaagtaggctgattgccacagataagcccttggtgtaggtgtttacaaaccggttgagctgggatgggtgcattcggggtgaaattatgtgcattttggattggatttttaagttggcaatattgccgccaagatcccgtcttgggttcatgttatgaaggaccaccaagacggtgtatccggtacatttaggaaatttatcgtgcagcttggatggaaaagcgtggaaaaatttggagacacccttgtgtcctccaagattttccatgcactcatccatgataatagcaatggggccgtgggcagcggcgcgggcaaacacgttccgtgggtctgacacatcatagttatgttcctgagttaaatcatcataagccattttaatgaatttggggcggagagtaccagattggggtatgaatgttccttcgggccccggagcatagttcccctcacagatttgcatttcccaagctttcagttccgagggtggaatcatgtccacctggggggctatgaaaaacaccgtttctggggcgggggtgattaattgtgatgatagcaaatttctgagcaattgagatttgccacatccggtggggccataaatgattccgattacgggttgcaggtggtagtttagggaacggcaactgccgtcttctcgaagcaagggggccacctcgttcatcatttcccttacatgcatattttcccgcaccaaatccattaggaggcgctctcctcctagtgatagaagttcttgtagtgaggaaaagtttttcagcggtttcagaccgtcagccatgggcattttggagagagtttgctgcaaaagttctagtctgttccacagttcagtgatgtgttctatggcatctcgatccagcagacctcctcgtttcgcgggtttggacggctcctggaatagggtatgagacgatgggcgtccagcgctgccagggttcggtccttccagggtctcagtgttcgagtcagggttgtttccgtcacagtgaaggggtgtgcgcctgcttgggcgcttgccagggtgcgcttcagactcatcctgctggtcgaaaacttctgtcgcttggcgccctgtatgtcggccaagtagcagtttaccatgagttcgtagttgagcgcctcggctgcgtggcctttggcgcggagcttacctttggaagttttcttgcataccgggcagtataggcatttcagcgcatacaacttgggcgcaaggaaaacggattctggggagtatgcatctgcgccgcaggaggcgcaaacagtttcacattccaccagccaggttaaatccggttcattggggtcaaaaacaagttttccgccatattttttgatgcgtttcttacctttggtctccatgagttcgtgtcctcgttgagtgacaaacaggctgtccgtgtccccgtagactgattttacaggcctcttctccagtggagtgcctcggtcttcttcgtacaggaactctgaccactctgatacaaaggcgcgcgtccaggccagcacaaaggaggctatgtgggaggggtagcgatcgttgtcaaccagggggtccaccttttccaaagtatgcaaacacatgtcaccctcttcaacatccaggaatgtgattggcttgtaggtgtatttcacgtgacctggggtccccgctgggggggtataaaagggggcggttctttgctcttcctcactgtcttccggatcgctgtccaggaacgtcagctgttggggtaggtattccctctcgaaggcgggcatgacctctgcactcaggttgtcagtttctaagaacgaggaggatttgatattgacagtgccggttgagatgcctttcatgaggttttcgtccatctggtcagaaaacacaatttttttattgtcaagtttggtggcaaatgatccatacagggcgttggataaaagtttggcaatggatcgcatggtttggttcttttccttgtccgcgcgctctttggcggcgatgttgagttggacatactcgcgtgccaggcacttccattcggggaagatagttgttaattcatctggcacgattctcacttgccaccctcgattatgcaaggtaattaaatccacactggtggccacctcgcctcgaaggggttcattggtccaacagagcctacctcctttcctagaacagaaagggggaagtgggtctagcataagttcatcgggagggtctgcatccatggtaaagattcccggaagtaaatccttatcaaaatagctgatgggagtggggtcatctaaggccatttgccattctcgagctgccagtgcgcgctcatatgggttaaggggactgccccatggcatgggatgggtgagtgcagaggcatacatgccacagatgtcatagacgtagatgggatcctcaaagatgcctatgtaggttggatagcatcgcccccctctgatacttgctcgcacatagtcatatagttcatgtgatggcgctagcagccccggacccaagttggtgcgattgggtttttctgttctgtagacgatctggcgaaagatggcgtgagaattggaagagatggtgggtctttgaaaaatgttgaaatgggcatgaggtagacctacagagtctctgacaaagtgggcataagattcttgaagcttggttaccagttcggcggtgacaagtacgtctagggcgcagtagtcaagtgtttcttgaatgatgtcataacctggttggtttttcttttcccacagttcgcggttgagaaggtattcttcgcgatccttccagtactcttctagcggaaacccgtctttgtctgcacggtaagatcctagcatgtagaactgattaactgccttgtaagggcagcagcccttctctacgggtagagagtatgcttgagcagcttttcgtagcgaagcgtgagtaagggcaaaggtgtctctgaccatgactttgaggaattggtatttgaagtcgatgtcgtcacaggctccctgttcccagagttggaagtctacccgtttcttgtaggcggggttgggcaaagcgaaagtaacatcattgaagagaatcttgccggccctgggcatgaaattgcgagtgatgcgaaaaggctgtggtacttccgctcggttattgataacctgggcagctaggacgatctcgtcgaaaccgttgatgttgtgtcctacgatgtataattctatgaaacgcggcgtgcctctgacgtgaggtagcttactgagctcatcaaaggttaggtctgtggggtcagataaggcgtagtgttcgagagcccattcgtgcaggtgaggattcgctttaaggaaggaggaccagaggtccactgccagtgctgtttgtaactggtcccggtactgacgaaaatgccgtccgactgccattttttctggggtgacgcaatagaaggtttgggggtcctgccgccagcgatcccacttgagttttatggcgaggtcataggcgatgttgacgagccgctggtctccagagagtttcatgaccagcatgaaggggattagctgcttgccaaaggaccccatccaggtgtaggtttccacatcgtaggtgagaaagagcctttctgtgcgaggatgagagccaatcgggaagaactggatctcctgccaccagttggaggaatggctgttgatgtgatggaagtagaactccctgcgacgcgccgagcattcatgcttgtgcttgtacagacggccgcagtagtcgcagcgttgcacgggttgtatctcgtgaatgagttgtacctggcttcccttgacgagaaatttcagtgggaagccgaggcctggcgattgtatctcgtgctttactatgttgtctgcatcggcctgttcatcttctgtctcgatggtggtcatgctgacgagccctcgcgggaggcaagtccagacctcggcgcggcaggggcggagctcgaggacgagagcgcgcaggctggagctgtccagggtcctgagacgctgcggactcaggttagtaggcagtgtcaggagattaacttgcatgatcttttggagggcgtgcgggaggttcagatagtacttgatctcaacgggtccgttggtggagatgtcgatggcttgcagggttccgtgtcccttgggcgctaccaccgtgcccttgtttttcattttggacggcggtggctctgttgcttcttgcatgtttagaagcggtgtcgagggcgcgcaccgggcggcaggggcggctcgggacccggcggcatggctggcagtggtacgtcggcgccgcgcgcgggtaggttctggtactgcgccctgagaagactcgcatgcgcgacgacgcggcggttgacatcctggatctgacgcctctgggtgaaagctaccggccccgtgagcttgaacctgaaagagagttcaacagaatcaatctcggtatcgttgacggcggcttgcctaaggatttcttgcacgtcaccagagttgtcctggtaggcgatctccgccatgaactgctcgatctcttcctcttgaagatctccgcggcccgctctctcgacggtggccgcgaggtcgttggagatgcgcccaatgagttgagagaatgcattcatgcccgcctcgttccagacgcggctgtagaccacggcccccacgggatctctcgcgcgcatgaccacctgggcgaggttgagctccacgtggcgggtgaagaccgcatagttgcataggcgctggaaaaggtagttgagtgtggtggcgatgtgctcggtgacgaagaaatacatgatccatcgtctcagcggcatctcgctgacatcgcccagagcttccaagcgctccatggcctcgtagaagtccacggcaaaattaaaaaactgggagtttcgcgcggacacggtcaactcctcttccagaagacggataagttcggcgatggtggtgcgcacctcgcgctcgaaagcccctgggatttcttcctcaatctcttcttcttccactaacatctcttcctcttcaggtggggctgcaggaggagggggaacgcggcgacgccggcggcgcacgggcagacggtcgatgaatctttcaatgacctctccgcggcggcggcgcatggtttcagtgacggcgcggccgttctcgcgcggtcgcagagtaaaaacaccgccgcgcatctccttaaagtggtgactgggaggttctccgtttgggagggagagggcgctgattatacattttattaattggcccgtagggactgcacgcagagatctgatcgtgtcaagatccacgggatctgaaaacctttcgacgaaagcgtctaaccagtcacagtcacaaggtaggctgagtacggcttcttgtgggcgggggtggttatgtgttcggtctgggtcttctgtttcttcttcatctcgggaaggtgagacgatgctgctggtgatgaaattaaagtaggcagttctaagacggcggatggtggcgaggagcaccaggtctttgggtccggcttgctggatacgcaggcgattggccattccccaagcattatcctgacatctagcaagatctttgtagtagtcttgcatgagccgttctacgggcacttcttcctcacccgttctgccatgcatacgtgtgagtccaaatccgcgcattggttgtaccagtgccaagtcagctacgactctttcggcgaggatggcttgctgtacttgggtaagggtggcttgaaagtcatcaaaatccacaaagcggtggtaagctcctgtattaatggtgtaagcacagttggccatgactgaccagttaactgtctggtgaccagggcgcacgagctcggtgtatttaaggcgcgaataggcgcgggtgtcaaagatgtaatcgttgcaggtgcgcaccagatactggtaccctataagaaaatgcggcggtggttggcggtagagaggccatcgttctgtagctggagcgccaggggcgaggtcttccaacataaggcggtgatagccgtagatgtacctggacatccaggtgattcctgcggcggtagtagaagcccgaggaaactcgcgtacgcggttccaaatgttgcgtagcggcatgaagtagttcattgtaggcacggtttgaccagtgaggcgcgcgcagtcattgatgctctatagacacggagaaaatgaaagcgttcagcgactcgactccgtagcctggaggaacgtgaacgggttgggtcgcggtgtaccccggttcgagacttgtactcgagccggccggagccgcggctaacgtggtattggcactcccgtctcgacccagcctacaaaaatccaggatacggaatcgagtcgttttgctggtttccgaatggcagggaagtgagtcctattttttttttttgccgctcagatgcatcccgtgctgcgacagatgcgcccccaacaacagcccccctcgcagcagcagcagcagcaatcacaaaaggctgtccctgcaactactgcaactgccgccgtgagcggtgcgggacagcccgcctatgatctggacttggaagagggcgaaggactggcacgtctaggtgcgccttcacccgagcggcatccgcgagttcaactgaaaaaagattctcgcgaggcgtatgtgccccaacagaacctatttagagacagaagcggcgaggagccggaggagatgcgagcttcccgctttaacgcgggtcgtgagctgcgtcacggtttggaccgaagacgagtgttgcgggacgaggatttcgaagttgatgaaatgacagggatcagtcctgccagggcacacgtggctgcagccaaccttgtatcggcttacgagcagacagtaaaggaagagcgtaacttccaaaagtcttttaataatcatgtgcgaaccctgattgcccgcgaagaagttacccttggtttgatgcatttgtgggatttgatggaagctatcattcagaaccctactagcaaacctctgaccgcccagctgtttctggtggtgcaacacagcagagacaatgaggctttcagagaggcgctgctgaacatcaccgaacccgaggggagatggttgtatgatcttatcaacattctacagagtatcatagtgcaggagcggagcctgggcctggccgagaaggtggctgccatcaattactcggttttgagcttgggaaaatattacgctcgcaaaatctacaagactccatacgttcccatagacaaggaggtgaagatagatgggttctacatgcgcatgacgctcaaggtcttgaccctgagcgatgatcttggggtgtatcgcaatgacagaatgcatcgcgcggttagcgccagcaggaggcgcgagttaagcgacagggaactgatgcacagtttgcaaagagctctgactggagctggaaccgagggtgagaattacttcgacatgggagctgacttgcagtggcagcctagtcgcagggctctgagcgccgcgacggcaggatgtgagcttccttacatagaagaggcggatgaaggcgaggaggaagagggcgagtacttggaagactgatggcacaacccgtgttttttgctagatggaacagcaagcaccggatcccgcaatgcgggcggcgctgcagagccagccgtccggcattaactcctcggacgattggacccaggccatgcaacgtatcatggcgttgacgactcgcaaccccgaagcctttagacagcaaccccaggccaaccgtctatcggccatcatggaagctgtagtgccttcccgctctaatcccactcatgagaaggtcctggccatcgtgaacgcgttggtggagaacaaagctattcgtccagatgaggccggactggtatacaacgctctcttagaacgcgtggctcgctacaacagtagcaatgtgcaaaccaatttggaccgtatgataacagatgtacgcgaagccgtgtctcagcgcgaaaggttccagcgtgatgccaacctgggttcgctggtggcgttaaatgctttcttgagtactcagcctgctaatgtgccgcgtggtcaacaggattatactaactttttaagtgctttgagactgatggtatcagaagtacctcagagcgaagtgtatcagtccggtcctgattacttctttcagactagcagacagggcttgcagacggtaaatctgagccaagcttttaaaaaccttaaaggtttgtggggagtgcatgccccggtaggagaaagagcaaccgtgtctagcttgttaactccgaactcccgcctattattactgttggtagctcctttcaccgacagcggtagcatcgaccgtaattcctatttgggttacctactaaacctgtatcgcgaagccatagggcaaagtcaggtggacgagcagacctatcaagaaattacccaagtcagtcgcgctttgggacaggaagacactggcagtttggaagccactctgaacttcttgcttaccaatcggtctcaaaagatccctcctcaatatgctcttactgcggaggaggagaggatccttagatatgtgcagcagagcgtgggattgtttctgatgcaagagggggcaactccgactgcagcactggacatgacagcgcgaaatatggagcccagcatgtatgccagtaaccgacctttcattaacaaactgctggactacttgcacagagctgccgctatgaactctgattatttcaccaatgccatcttaaacccgcactggctgcccccacctggtttctacacgggcgaatatgacatgcccgaccctaatgacggatttctgtgggacgacgtggacagcgatgttttttcacctctttctgatcatcgcacgtggaaaaaggaaggcggcgatagaatgcattcttctgcatcgctgtccggggtcatgggtgctaccgcggctgagcccgagtctgcaagtccttttcctagtctacccttttctctacacagtgtacgtagcagcgaagtgggtagaataagtcgcccgagtttaatgggcgaagaggagtatctaaacgattccttgctcagaccggcaagagaaaaaaatttcccaaacaatggaatagaaagtttggtggataaaatgagtagatggaagacttatgctcaggatcacagagacgagcctgggatcatggggattacaagtagagcgagccgtagacgccagcgccatgacagacagaggggtcttgtgtgggacgatgaggattcggccgatgatagcagcgtgctggacttgggtgggagaggaaggggcaacccgtttgctcatttgcgccctcgcttgggtggtatgttgtaaaaaaaaataaaaaaaaaactcaccaaggccatggcgacgagcgtacgttcgttcttctttattatctgtgtctagtataatgaggcgagtcgtgctaggcggagcggtggtgtatccggagggtcctcctccttcgtacgagagcgtgatgcagcagcagcaggcgacggcggtgatgcaatccccactggaggctccctttgtgcctccgcgatacctggcacctacggagggcagaaacagcattcgttattcggaactggcacctcagtacgataccaccaggttgtatctggtggacaacaagtcggcggacattgcttctctgaactatcagaatgaccacagcaacttcttgaccacggtggtgcaaaacaatgactttacccctacggaagccagcacccagaccattaactttgatgaacgatcgcggtggggcggtcagctaaagaccatcatgcatactaacatgccaaacgtgaacgagtatatgtttagtaacaagttcaaagcgcgtgtgatggtgtccagaaaacctcccgacggtgctgcagttggggatacttatgatcacaagcaggatattttgaaatatgagtggttcgagtttactttgccagaaggcaacttttcagttactatgactattgatttgatgaacaatgccatcatagataattacttgaaagtgggtagacagaatggagtgcttgaaagtgacattggtgttaagttcgacaccaggaacttcaagctgggatgggatcccgaaaccaagttgatcatgcctggagtgtatacgtatgaagccttccatcctgacattgtcttactgcctggctgcggagtggattttaccgagagtcgtttgagcaaccttcttggtatcagaaaaaaacagccatttcaagagggttttaagattttgtatgaagatttagaaggtggtaatattccggccctcttggatgtagatgcctatgagaacagtaagaaagaacaaaaagccaaaatagaagctgctacagctgctgcagaagctaaggcaaacatagttgccagcgactctacaagggttgctaacgctggagaggtcagaggagacaattttgcgccaacacctgttccgactgcagaatcattattggccgatgtgtctgaaggaacggacgtgaaactcactattcaacctgtagaaaaagatagtaagaatagaagctataatgtgttggaagacaaaatcaacacagcctatcgcagttggtatctttcgtacaattatggcgatcccgaaaaaggagtgcgttcctggacattgctcaccacctcagatgtcacctgcggagcagagcaggtctactggtcgcttccagacatgatgaaggatcctgtcactttccgctccactagacaagtcagtaactaccctgtggtgggtgcagagcttatgcccgtcttctcaaagagcttctacaacgaacaagctgtgtactcccagcagctccgccagtccacctcgcttacgcacgtcttcaaccgctttcctgagaaccagattttaatccgtccgccggcgcccaccattaccaccgtcagtgaaaacgttcctgctctcacagatcacgggaccctgccgttgcgcagcagtatccggggagtccaacgtgtgaccgttactgacgccagacgccgcacctgtccctacgtgtacaaggcactgggcatagtcgcaccgcgcgtcctttcaagccgcactttctaaaaaaaaaaaaaatgtccattcttatctcgcccagtaataacaccggttggggtctgcgcgctccaagcaagatgtacggaggcgcacgcaaacgttctacccaacatcctgtccgtgttcgcggacattttcgcgctccatggggcgccctcaagggccgcactcgcgttcgaaccaccgtcgatgatgtaatcgatcaggtggttgccgacgcccgtaattatactcctactgcgcctacatctactgtggatgcagttattgacagtgtagtggctgacgctcgcaactatgctcgacgtaagagccggcgaaggcgcattgccagacgccaccgagctaccactgccatgcgagccgcaagagctctgctacgaagagctagacgcgtggggcgaagagccatgcttagggcggccagacgtgcagcttcgggcgccagcgccggcaggtcccgcaggcaagcagccgctgtcgcagcggcgactattgccgacatggcccaatcgcgaagaggcaatgtatactgggtgcgtgacgctgccaccggtcaacgtgtacccgtgcgcacccgtccccctcgcacttagaagatactgagcagtctccgatgttgtgtcccagcggcgaggatgtccaagcgcaaatacaaggaagaaatgctgcaggttatcgcacctgaagtctacggccaaccgttgaaggatgaaaaaaaaccccgcaaaatcaagcgggttaaaaaggacaaaaaagaagaggaagatggcgatgatgggctggcggagtttgtgcgcgagtttgccccacggcgacgcgtgcaatggcgtgggcgcaaagttcgacatgtgttgagacctggaacttcggtggtctttacacccggcgagcgttcaagcgctacttttaagcgttcctatgatgaggtgtacggggatgatgatattcttgagcaggcggctgaccgattaggcgagtttgcttatggcaagcgtagtagaataacttccaaggatgagacagtgtcgatacccttggatcatggaaatcccacccctagtcttaaaccggtcactttgcagcaagtgttacccgtaactccgcgaacaggtgttaaacgcgaaggtgaagatttgtatcccactatgcaactgatggtacccaaacgccagaagttggaggacgttttggagaaagtaaaagtggatccagatattcaacctgaggttaaagtgagacccattaagcaggtagcgcctggtctgggggtacaaactgtagacattaagattcccactgaaagtatggaagtgcaaactgaacccgcaaagcctactgccacctccactgaagtgcaaacggatccatggatgcccatgcctattacaactgacgccgccggtcccactcgaagatcccgacgaaagtacggtccagcaagtctgttgatgcccaattatgttgtacacccatctattattcctactcctggttaccgaggcactcgctactatcgcagccgaaacagtacctcccgccgtcgccgcaagacacctgcaaatcgcagtcgtcgccgtagacgcacaagcaaaccgactcccggcgccctggtgcggcaagtgtaccgcaatggtagtgcggaacctttgacactgccgcgtgcgcgttaccatccgagtatcatcacttaatcaatgttgccgctgcctccttgcagatatggccctcacttgtcgccttcgcgttcccatcactggttaccgaggaagaaactcgcgccgtagaagagggatgttgggacgcggaatgcgacgctacaggcgacggcgtgctatccgcaagcaattgcggggtggttttttaccagccttaattccaattatcgctgctgcaattggcgcgataccaggcatagcttccgtggcggttcaggcctcgcaacgacattgacattggaaaaaaacgtataaataaaaaaaaaaaaatacaatggactctgacactcctggtcctgtgactatgttttcttagagatggaagacatcaatttttcatccttggctccgcgacacggcacgaagccgtacatgggcacctggagcgacatcggcacgagccaactgaacgggggcgccttcaattggagcagtatctggagcgggcttaaaaattttggctcaaccataaaaacatacgggaacaaagcttggaacagcagtacaggacaggcgcttagaaataaacttaaagaccagaacttccaacaaaaagtagtcgatgggatagcttccggcatcaatggagtggtagatttggctaaccaggctgtgcagaaaaagataaacagtcgtttggacccgccgccagcaaccccaggtgaaatgcaagtggaggaagaaattcctccgccagaaaaacgaggcgacaagcgtccgcgtcccgatttggaagagacgctggtgacgcgcgtagatgaaccgccttcttatgaggaagcaacgaagcttggaatgcccaccactagaccgatagccccaatggccaccggggtgatgaaaccttctcagttgcatcgacccgtcaccttggatttgccccctccccctgctgctactgctgtacccgcttctaagcctgtcgctgccccgaaaccagtcgccgtagccaggtcacgtcccgggggcgctcctcgtccaaatgcgcactggcaaaatactctgaacagcatcgtgggtctaggcgtgcaaagtgtaaaacgccgtcgctgcttttaattaaatatggagtagcgcttaacttgcctatctgtgtatatgtgtcattacacgccgtcacagcagcagaggaaaaaaggaagaggtcgtgcgtcgacgctgagttactttcaagatggccaccccatcgatgctgccccaatgggcatacatgcacatcgccggacaggatgcttcggagtacctgagtccgggtctggtgcagttcgcccgcgccacagacacctacttcaatctgggaaataagtttagaaatcccaccgtagcgccgacccacgatgtgaccaccgaccgtagccagcggctcatgttgcgcttcgtgcccgttgaccgggaggacaatacatactcttacaaagtgcggtacaccctggccgtgggcgacaacagagtgctggatatggccagcacgttctttgacattaggggtgtgttggacagaggtcccagtttcaaaccctattctggtacggcttacaactccctggctcctaaaggcgctccaaatacatctcagtggattgcagaaggtgtaaaaaatacaactggtgaggaacacgtaacagaagaggaaaccaatactactacttacacttttggcaatgctcctgtaaaagctgaagctgaaattacaaaagaaggactcccagtaggtttggaagtttcagatgaagaaagtaaaccgatttatgctgataaaacatatcagccagaacctcagctgggagatgaaacttggactgaccttgatggaaaaaccgaaaagtatggaggcagggctctcaaacccgatactaagatgaaaccatgctacgggtcctttgccaaacctactaatgtgaaaggcggtcaggcaaaacaaaaaacaacggagcagccaaatcagaaagtcgaatatgatatcgacatggagttttttgatgcggcatcgcagaaaacaaacttaagtcctaaaattgtcatgtatgcagaaaatgtaaatttggaaactccagacactcatgtagtgtacaaacctggaacagaagacacaagttccgaagctaatttgggacaacaatctatgcccaacagacccaactacattggcttcagagataactttattggacttatgtactataacagtactggtaacatgggggtgctggctggtcaagcgtctcagttaaatgcagtggttgacttgcaggacagaaacacagaactttcttaccaactcttgcttgactctctgggcgacagaaccagatactttagcatgtggaatcaggctgtggacagttatgatcctgatgtacgtgttattgaaaatcatggtgtggaagatgaacttcccaactactgttttccactggacggcataggtgttccaacaaccagttacaaatcaatagttccaaatggagacaatgcgcctaattggaaggaacctgaagtaaatggaacaagtgagatcggacagggtaatttgtttgccatggaaattaaccttcaagccaatctatggcgaagtttcctttattccaatgtggctctatatctcccagactcgtacaaatacaccccgtccaatgtcactcttccagaaaacaaaaacacctacgactacatgaacgggcgggtggtgccgccatctctagtagacacctatgtgaacattggtgccaggtggtctctggatgccatggacaatgtcaacccattcaaccaccaccgtaacgctggcttgcgttaccgatccatgcttctgggtaacggacgttatgtgcctttccacatacaagtgcctcaaaaattcttcgctgttaaaaacctgctgcttctcccaggctcctacacttatgagtggaactttaggaaggatgtgaacatggttctacagagttccctcggtaacgacctgcgggtagatggcgccagcatcagtttcacgagcatcaacctctatgctacttttttccccatggctcacaacaccgcttccacccttgaagccatgctgcggaatgacaccaatgatcagtcattcaacgactacctatctgcagctaacatgctctaccccattcctgccaatgcaaccaatattcccatttccattccttctcgcaactgggcggctttcagaggctggtcatttaccagactgaaaaccaaagaaactccctctttggggtctggatttgacccctactttgtctattctggttctattccctacctggatggtaccttctacctgaaccacacttttaagaaggtttccatcatgtttgactcttcagtgagctggcctggaaatgacaggttactatctcctaacgaatttgaaataaagcgcactgtggatggcgaaggctacaacgtagcccaatgcaacatgaccaaagactggttcttggtacagatgctcgccaactacaacatcggctatcagggcttctacattccagaaggatacaaagatcgcatgtattcatttttcagaaacttccagcccatgagcaggcaggtggttgatgaggtcaattacaaagacttcaaggccgtcgccataccctaccaacacaacaactctggctttgtgggttacatggctccgaccatgcgccaaggtcaaccctatcccgctaactatccctatccactcattggaacaactgccgtaaatagtgttacgcagaaaaagttcttgtgtgacagaaccatgtggcgcataccgttctcgagcaacttcatgtctatgggggcccttacagacttgggacagaatatgctctatgccaactcagctcatgctctggacatgacctttgaggtggatcccatggatgagcccaccctgctttatcttctcttcgaagttttcgacgtggtcagagtgcatcagccacaccgcggcatcatcgaggcagtctacctgcgtacaccgttctcggccggtaacgctaccacgtaagaagcttcttgcttcttgcaaatagcagctgcaaccatggcctgcggatcccaaaacggctccagcgagcaagagctcagagccattgtccaagacctgggttgcggaccctattttttgggaacctacgataagcgcttcccggggttcatggcccccgataagctcgcctgtgccattgtaaatacggccggacgtgagacggggggagagcactggttggctttcggttggaacccacgttctaacacctgctacctttttgatccttttggattctcggatgatcgtctcaaacagatttaccagtttgaatatgagggtctcctgcgccgcagcgctcttgctaccaaggaccgctgtattacgctggaaaaatctacccagaccgtgcagggtccccgttctgccgcctgcggacttttctgctgcatgttccttcacgcctttgtgcactggcctgaccgtcccatggacggaaaccccaccatgaaattgctaactggagtgccaaacaacatgcttcattctcctaaagtccagcccaccctgtgtgacaatcaaaaagcactctaccattttcttaatacccattcgccttattttcgctcccatcgtacacacatcgaaagggccactgcgttcgaccgtatggatgttcaataatgactcatgtaaacaacgtgttcaataaacatcactttatttttttacatgtatcaaggctctgcattacttatttatttacaagtcgaatgggttctgacgagaatcagaatgacccgcaggcagtgatacgttgcggaactgatacttgggttgccacttgaattcgggaatcaccaacttgggaaccggtatatcgggcaggatgtcactccacagctttctggtcagctgcaaagctccaagcaggtcaggagccgaaatcttgaaatcacaattaggaccagtgctttgagcgcgagagttgcggtacaccggattgcagcactgaaacaccatcagcgacggatgtctcacgcttgccagcacggtgggatctgcaatcatgcccacatccagatcttcagcattggcaatgctgaacggggtcatcttgcaggtctgcctacccatggcgggcacccaattaggcttgtggttgcaatcgcagtgcagggggatcagtatcatcttggcctgatcctgtctgattcctggatacacggctctcatgaaagcatcatattgcttgaaagcctgctgggctttactaccctcggtataaaacatcccgcaggacctgctcgaaaactggttagctgcacagccggcatcattcacacagcagcgggcgtcattgttagctatttgcaccacacttctgccccagcggttttgggtgattttggttcgctcgggattctcctttaaggctcgttgtccgttctcgctggccacatccatctcgataatctgctccttctgaatcataatattgccatgcaggcacttcagcttgccctcataatcattgcagccatgaggccacaacgcacagcctgtacattcccaattatggtgggcgatctgagaaaaagaatgtatcattccctgcagaaatcttcccatcatcgtgctcagtgtcttgtgactagtgaaagttaactggatgcctcggtgctcctcgtttacgtactggtgacagatgcgcttgtattgttcgtgttgctcaggcattagtttaaaagaggttctaagttcgttatccagcctgtacttctccatcagcagacacatcacttccatgcctttctcccaagcagacaccaggggcaagctaatcggattcttaacagtgcaggcagcagctcctttagccagagggtcatctttagcgatcttctcaatgcttcttttgccatccttctcaacgatgcgcacgggcgggtagctgaaacccactgctacaagttgcgcctcttctctttcttcttcgctgtcttgactgatgtcttgcatggggatatgtttggtcttccttggcttctttttggggggtatcggaggaggaggactgtcgctccgttccggagacagggaggattgtgacgtttcgctcaccattaccaactgactgtcggtagaagaacctgaccccacacggcgacaggtgtttctcttcgggggcagaggtggaggcgattgcgaagggctgcggtccgacctggaaggcggatgactggcagaaccccttccgcgttcgggggtgtgctccctgtggcggtcgcttaactgatttccttcgcggctggccattgtgttctcctaggcagagaaacaacagacatggaaactcagccattgctgtcaacatcgccacgagtgccatcacatctcgtcctcagcgacgaggaaaaggagcagagcttaagcattccaccgcccagtcctgccaccacctctaccctagaagataaggaggtcgacgcatctcatgacatgcagaataaaaaagcgaaagagtctgagacagacatcgagcaagacccgggctatgtgacaccggtggaacacgaggaagagttgaaacgctttctagagagagaggatgaaaactgcccaaaacaacgagcagataactatcaccaagatgctggaaatagggatcagaacaccgactacctcatagggcttgacggggaagacgcgctccttaaacatctagcaagacagtcgctcatagtcaaggatgcattattggacagaactgaagtgcccatcagtgtggaagagctcagccgcgcctacgagcttaacctcttttcacctcgtactccccccaaacgtcagccaaacggcacctgcgagccaaatcctcgcttaaacttttatccagcttttgctgtgccagaagtactggctacctatcacatcttttttaaaaatcaaaaaattccagtctcctgccgcgctaatcgcacccgcgccgatgccctactcaatctgggacctggttcacgcttacctgatatagcttccttggaagaggttccaaagatcttcgagggtctgggcaataatgagactcgggccgcaaatgctctgcaaaagggagaaaatggcatggatgagcatcacagcgttctggtggaattggaaggcgataatgccagactcgcagtactcaagcgaagcatcgaggtcacacacttcgcatatcccgctgtcaacctgccccctaaagtcatgacggcggtcatggaccagttactcattaagcgcgcaagtcccctttcagaagacatgcatgacccagatgcctgtgatgagggtaaaccagtggtcagtgatgagcagctaacccgatggctgggcaccgactctcccagggatttggaagagcgtcgcaagcttatgatggccgtggtgctggttaccgtagaactagagtgtctccgacgtttctttaccgattcagaaaccttgcgcaaactcgaagagaatctgcactacacttttagacacggctttgtgcggcaggcatgcaagatatctaacgtggaactcaccaacctggtttcctacatgggtattctgcatgagaatcgcctaggacaaagcgtgctgcacagcaccctgaagggggaagcccgccgtgattacatccgcgattgtgtctatctgtacctgtgccacacgtggcaaaccggcatgggtgtatggcagcaatgtttagaagaacagaacttgaaagagcttgacaagctcttacagaaatctcttaaggttctgtggacagggttcgacgagcgcaccgtcgcttccgacctggcagacctcatcttcccagagcgtctcagggttactttgcgaaacggattgcctgactttatgagccagagcatgcttaacaattttcgctctttcatcctggaacgctccggtatcctgcccgccacctgctgcgcactgccctccgactttgtgcctctcacctaccgcgagtgccccccgccgctatggagtcactgctacctgttccgtctggccaactatctctcctaccactcggatgtgatcgaggatgtgagcggagacggcttgctggagtgtcactgccgctgcaatctgtgcacgccccaccggtccctagcttgcaacccccagttgatgagcgaaacccagataataggcacctttgaattgcaaggccccagcagccaaggcgatgggtcttctcctgggcaaagtttaaaactgaccccgggactgtggacctccgcctacttgcgcaagtttgctccggaagattaccacccctatgaaatcaagttctatgaggaccaatcacagcctccaaaggccgaactttcggcctgcgtcatcacccagggggcaattctggcccaattgcaagccatccaaaaatcccgccaagaatttctactgaaaaagggtaagggggtctaccttgacccccagaccggcgaggaactcaacacaaggttccctcaggatgtcccaacgacgagaaaacaagaagttgaaggtgcagccgccgcccccagaagatatggaggaagattgggacagtcaggcagaggaggcggaggaggacagtctggaggacagtctggaggaagacagtttggaggaggaaaacgaggaggcagaggaggtggaagaagtaaccgccgacaaacagttatcctcggctgcggagacaagcaacagcgctaccatctccgctccgagtcgaggaacccggcggcgtcccagcagtagatgggacgagaccggacgcttcccgaacccaaccagcgcttccaagaccggtaagaaggatcggcagggatacaagtcctggcgggggcataagaatgccatcatctcctgcttgcatgagtgcgggggcaacatatccttcacgcggcgctacttgctattccaccatggggtgaactttccgcgcaatgttttgcattactaccgtcacctccacagcccctactatagccagcaaatcccggcagtctcgacagataaagacagcggcggcgacctccaacagaaaaccagcagcggcagttagaaaatacacaacaagtgcagcaacaggaggattaaagattacagccaacgagccagcgcaaacccgagagttaagaaatcggatctttccaaccctgtatgccatcttccagcagagtcggggtcaagagcaggaactgaaaataaaaaaccgatctctgcgttcgctcaccagaagttgtttgtatcacaagagcgaagatcaacttcagcgcactctcgaggacgccgaggctctcttcaacaagtactgcgcgctgactcttaaagagtaggcagcgaccgcgcttattcaaaaaaggcgggaattacatcatcctcgacatgagtaaagaaattcccacgccttacatgtggagttatcaaccccaaatgggattggcggcaggcgcctcccaggactactccacccgcatgaattggctcagcgccgggccttctatgatttctcgagttaatgatatacgcgcctaccgaaaccaaatacttttggaacagtcagctcttaccaccacgccccgccaacaccttaatcccagaaattggcccgccgccctagtgtaccaggaaagtcccgctcccaccactgtattacttcctcgagacgcccaggccgaagtccaaatgactaatgcaggtgcgcagttagctggcggctccaccctatgtcgtcacaggcctcggcataatataaaacgcctgatgatcagaggccgaggtatccagctcaacgacgagtcggtgagctctccgcttggtctacgaccagacggaatctttcagattgccggctgcgggagatcttccttcacccctcgtcaggctgttctgactttggaaagttcgtcttcgcaaccccgctcgggcggaatcgggaccgttcaatttgtggaggagtttactccctctgtctacttcaaccccttctccggatctcctgggcattacccggacgagttcataccgaacttcgacgcgattagcgagtcagtggacggctacgattgatgtctggtgacgcggctgagctatctcggctgcgacatctagaccactgccgccgctttcgctgctttgcccgggaactcattgagttcatctacttcgaactccccaaggatcaccctcaaggtccggcccacggagtgcggatttctatcgaaggcaaaatagactctcgcctgcaacgaattttctcccagcggcccgtgctgatcgagcgagaccagggaaacaccacggtttccatctactgcatttgtaatcaccccggattgcatgaaagcctttgctgtcttatgtgtactgagtttaataaaaactgaattaagactctcctacggactgccgcttcttcaacccggattttacaaccagaagaacgaaacttttcctgtcgtccaggactctgttaacttcacctttcctactcacaaactagaagctcaacgactacaccgcttttccagaagcattttccctactaatactactttcaaaaccggaggtgagctccaaggtcttcctacagaaaacccttgggtggaagcgggccttgtagtgctaggaattcttgcgggtgggcttgtgattattctttgctacctatacacaccttgcttcactttcttagtggtgttgtggtattggtttaaaaaatggggcccatactagtcttgcttgttttactttcgcttttggaaccgggttctgccaattacgatccatgtctagacttcgacccagaaaactgcacacttacttttgcacccgacacaagccgcatctgtggagttcatcgcctctcttacgaacttggcccccaacgacaaaaatttacctgcatggtgggaatcaaccccatagttatcacccagcaaagtggagatactaagggttgcattcactgctcctgcgattccatcgagtgcacctacaccctgctgaagaccctatgcggcctaagagacctgctaccaatgaattaaaaaatgattaataaaaaatcacttacttgaaatcagcaataaggtctctgttgaaattttctcccagcagcacctcacttccctcttcccaactctggtattctaaaccccgttcagcggcatactttctccatactttaaaggggatgtcaaattttagctcctctcctgtacccacaatcttcatgtctttcttcccagatgaccaagagagtccggctcagtgactccttcaaccctgtctacccctatgaagatgaaagcacctcccaacacccctttataaacccagggtttatttccccaaatggcttcacacaaagcccaaacggagttcttactttaaaatgtttaaccccactaacaaccacaggcggatctctacagctaaaagtgggagggggacttacagtggatgacaccaacggttttttgaaagaaaacataagtgccaccacaccactcgttaagactggtcactctataggtttaccactaggagccggattgggaacgaatgaaaataaactttgtatcaaattaggacaaggacttacattcaattcaaacaacatttgcattgatgacaatattaacaccttatggacaggagtcaaccccaccgaagccaactgtcaaatcatgaactccagtgaatctaatgattgcaaattaattctaacactagttaaaactggagcactagtcactgcatttgtttatgttataggagtatctaacaattttaatatgctaactacacacagaaatataaattttactgcagagctgtttttcgattctactggtaatttactaactagactctcatccctcaaaactccacttaatcataaatcaggacaaaacatggctactggtgccattactaatgctaaaggtttcatgcccagcacgactgcctatcctttcaatgataattctagagaaaaagaaaactacatttacggaacttgttactacacagctagtgatcgcactgcttttcccattgacatatctgtcatgcttaaccgaagagcaataaatgacgagacatcatattgtattcgtataacttggtcctggaacacaggagatgccccagaggtgcaaacctctgctacaaccctagtcacctccccatttaccttttactacatcagagaagacgactgacaaataaagtttgcgatcgccaggcccaccatggctcagtcactggctctgagcctccttatcctggttctggcctttggcatccccaggacccaaggcagtgatggaggggctcaggactgttgcctcaagtacagccaaaggaagattcccgccaaggttgtccgcagctaccggaagcaggaaccaagcttaggctgctccatcccagctatcctgttcttgccccgcaagcgctctcaggcagagctatgtgcagacccaaaggagctctgggtgcagcagctgatgcagcatctggacaagacaccatccccacagaaaccagcccagggctgcaggaaggacaggggggcctccaagactggcaagaaaggaaagggctccaaaggctgcaagaggactgagcggtcacagacccctaaagggccaggaagcggagagggcagaggaagtctgctaacatgcggtgacgtcgaggagaatcctggacctgactggacctggcgcatcctgttcttggtggcagctgctacgggagctcattccaactgggtgaatgtaataagtgatttgaaaaaaattgaagatcttattcaatctatgcatattgatgctactttatatacggaaagtgatgttcaccccagttgcaaagtaacagcaatgaagtgctttctcttggagttacaagttatttcacttgagtccggagatgcaagtattcatgatacagtagaaaatctgatcatcctagcaaacaacagtttgtcttctaatgggaatgtaacagaatctggatgcaaagaatgtgaggaactggaggaaaaaaatattaaagaatttttgcagagttttgtacatattgtccaaatgttcatcaacacttctggaagcggagctactaacttcagcctgctgaagcaggctggagacgtggaggagaaccctggacctgccttgacctttgctttactggtggccctcctggtgctcagctgcaagtcaagctgctctgtgggctgtgatctgcctcaaacccacagcctgggtagcaggaggaccttgatgctcctggcacagatgaggagaatctctcttttctcctgcttgaaggacagacatgactttggatttccccaggaggagtttggcaaccagttccaaaaggctgaaaccatccctgtcctccatgagatgatccagcagatcttcaatctcttcagcacaaaggactcatctgctgcttgggatgagaccctcctagacaaattctacactgaactctaccagcagctgaatgacctggaagcctgtgtgatacagggggtgggggtgacagagactcccctgatgaaggaggactccattctggctgtgaggaaatacttccaaagaatcactctctatctgaaagagaagaaatacagcccttgtgcctgggaggttgtcagagcagaaatcatgagatctttttctttgtcaacaaacttgcaagaaagtttaagaagtaaggaaggaagcggacagtgtactaattatgctctcttgaaattggctggagatgttgagagcaaccctggacctaagaaaagtggtgttcttttcctcttgggcatcatcttgctggttctgattggagtgcaaggaaccccagtagtgagaaagggtcgctgttcctgcatcagcaccaaccaagggactatccacctacaatccttgaaagaccttaaacaatttgccccaagcccttcctgcgagaaaattgaaatcattgctacactgaagaatggagttcaaacatgtctaaacccagattcagcagatgtgaaggaactgattaaaaagtgggagaaacaggtcagccaaaagaaaaagcaaaagaatgggaaaaaacatcaaaaaaagaaagttctgaaagttcgaaaatctcaacgttctcgtcaaaagaagactacaggaagcggagtgaaacagactttgaattttgaccttctcaagttggcgggagacgtggagtccaaccctggacctatgtgtcaccagcagttggtcatctcttggttttccctggtttttctggcatctcccctcgtggccatatgggaactgaagaaagatgtttatgtcgtagaattggattggtatccggatgcccctggagaaatggtggtcctcacctgtgacacccctgaagaagatggtatcacctggaccttggaccagagcagtgaggtcttaggctctggcaaaaccctgaccatccaagtcaaagagtttggagatgctggccagtacacctgtcacaaaggaggcgaggttctaagccattcgctcctgctgcttcacaaaaaggaagatggaatttggtccactgatattttaaaggaccagaaagaacccaaaaataagacctttctaagatgcgaggccaagaattattctggacgtttcacctgctggtggctgacgacaatcagtactgatttgacattcagtgtcaaaagcagcagaggctcttctgacccccaaggggtgacgtgcggagctgctacactctctgcagagagagtcagaggggacaacaaggagtatgagtactcagtggagtgccaggaggacagtgcctgcccagctgctgaggagagtctgcccattgaggtcatggtggatgccgttcacaagctcaagtatgaaaactacaccagcagcttcttcatcagggacatcatcaaacctgacccacccaagaacttgcagctgaagccattaaagaattctcggcaggtggaggtcagctgggagtaccctgacacctggagtactccacattcctacttctccctgacattctgcgttcaggtccagggcaagagcaagagagaaaagaaagatagagtcttcacggacaagacctcagccacggtcatctgccgcaaaaatgccagcattagcgtgcgggcccaggaccgctactatagctcatcttggagcgaatgggcatctgtgccctgcagtggagggggcggcagcgggggaggcggcagcggcggcgggggatcgagaaacctccccgtggccactccagacccaggaatgttcccatgccttcaccactcccaaaacctgctgagggccgtcagcaacatgctccagaaggccagacaaactctagaattttacccttgcacttctgaagagattgatcatgaagatatcacaaaagataaaaccagcacagtggaggcctgtttaccattggaattaaccaagaatgagagttgcctaaattccagagagacctctttcataactaatgggagttgcctggcctccagaaagacctcttttatgatggccctgtgccttagtagtatttatgaagacttgaagatgtaccaggtggagttcaagaccatgaatgcaaagcttctgatggatcctaagaggcagatctttctagatcaaaacatgctggcagttattgatgagctgatgcaggccctgaatttcaacagtgagactgtgccacaaaaatcctcccttgaagaaccggatttttataaaactaaaatcaagctctgcatacttcttcatgctttcagaattcgggcagtgactattgatagagtgatgagctatctgaatgcttcctaagctagcttgactgactgagatacagcgtaccttcagctcacagacatgataagatacattgatgagtttggacaaaccacaactagaatgcagtgaaaaaaatgctttatttgtgaaatttgtgatgctattgctttatttgtaaccattataagctgcaataaacaagttaacaacaacaattgcattcattttatgtttcaggttcagggggaggtgtgggaggttttttaaagcaagtaaaacctctacaaatgtggtagtcgtcagctatcctgcaggaacttgtttatttgaaaatcaattcacaaaatccgagtagttattttgcctcccccttcccatttaacagaatacaccaatctctccccacgcacagctttaaacatttggataccattagatatagacatggttttagattccacattccaaacagtttcagagcgagccaatctggggtcagtgatagataaaaatccatcgggatagtcttttaaagcgctttcacagtccaactgctgcggatgcgactccggagtctggatcacggtcatctggaagaagaacgatgggaatcataatccgaaaacggtatcggacgattgtgtctcatcaaacccacaagcagccgctgtctgcgtcgctccgtgcgactgctgtttatgggatcagggtccacagtgtcctgaagcatgattttaatagcccttaacatcaactttctggtgcgatgcgcgcagcaacgcattctgatttcactcaaatctttgcagtaggtacaacacattattacaatattgtttaataaaccataattaaaagcgctccagccaaaactcatatctgatataatcgcccctgcatgaccatcataccaaagtttaatataaattaaatgacgttccctcaaaaacacactacccacatacatgatctcttttggcatgtgcatattaacaatctgtctgtaccatggacaacgttggttaatcatgcaacccaatataaccttccggaaccacactgccaacaccgctcccccagccatgcattgaagtgaaccctgctgattacaatgacaatgaagaacccaattctctcgaccgtgaatcacttgagaatgaaaaatatctatagtggcacaacatagacataaatgcatgcatcttctcataatttttaactcctcaggatttagaaacatatcccagggaataggaagctcttgcagaacagtaaagctggcagaacaaggaagaccacgaacacaacttacactatgcatagtcatagtatcacaatctggcaacagcgggtggtcttcagtcatagaagctcgggtttcattttcctcacaacgtggtaactgggctctggtgtaagggtgatgtctggcgcatgatgtcgagcgtgcgcgcaaccttgtcataatggagttgcttcctgacattctcgtattttgtatagcaaaacgcggccctggcagaacacactcttcttcgccttctatcctgccgcttagcgtgttccgtgtgatagttcaagtacaaccacactcttaagttggtcaaaagaatgctggcttcagttgtaatcaaaactccatcgcatctaatcgttctgaggaaatcatccaagcaatgcaactggattgtgtttcaagcaggagaggagagggaagagacggaagaaccatgttaatttttattccaaacgatctcgcagtacttcaaattgtagatcgcgcagatggcatctctcgcccccactgtgttggtgaaaaagcacagctagatcaaaagaaatgcgattttcaaggtgctcaacggtggcttccagcaaagcctccacgcgcacatccaagaacaaaagaataccaaaagaaggagcattttctaactcctcaatcatcatattacattcctgcaccattcccagataattttcagctttccagccttgaattattcgtgtcagttcttgtggtaaatccaatccacacattacaaacaggtcccggagggcgccctccaccaccattcttaaacacaccctcataatgacaaaatatcttgctcctgtgtcacctgtagcgaattgagaatggcaacatcaattgacatgcccttggctctaagttcttctttaagttctagttgtaaaaactctctcatattatcaccaaactgcttagccagaagccccccgggaacaagagcaggggacgctacagtgcagtacaagcgcagacctccccaattggctccagcaaaaacaagattggaataagcatattgggaaccgccagtaatatcatcgaagttgctggaaatataatcaggcagagtttcttgtaaaaattgaataaaagaaaaatttgccaaaaaaacattcaaaacctctgggatgcaaatgcaataggttaccgcgctgcgctccaacattgttagttttgaattagtctgcaaaaataaaaaaaaaaacaagcgtcatatcatagtagcctgacgaacagatggataaatcagtctttccatcacaagacaagccacagggtctccagctcgaccctcgtaaaacctgtcatcatgattaaacaacagcaccgaaagttcctcgcggtgaccagcatgaataattcttgatgaagcatacaatccagacatgttagcatcagttaacgagaaaaaacagccaacatagcctttgggtataattatgcttaatcgtaagtatagcaaagccacccctcgcggatacaaagtaaaaggcacaggagaataaaaaatataattatttctctgctgctgttcaggcaacgtcgcccccggtccctctaaatacacatacaaagcctcatcagccatggcttaccagacaaagtacagcgggcacacaaagcacaagctctaaagtgactctccaacctctccacaatatatatatacacaagccctaaactgacgtaatgggagtaaagtgtaaaaaatcccgccaaacccaacacacaccccgaaactgcgtcaccagggaaaagtacagtttcacttccgcaatcccaacaggcgtaacttcctctttctcacggtacgtgatatcccactaacttgcaacgtcattttcccacggtcgcaccgccccttttagccgttaaccccacagccaatcaccacacgatccacactttttaaaatcacctcatttacatattggcaccattccatctataaggtatattatatagataga

SEQ ID NO: 96 - DNA, 36253 bp, Artificial Sequence
  Genome sequence of NG-753 virus
tctatctatataatataccttatagatggaatggtgccaatatgtaaatgaggtgattttaaaaagtgtggatcgtgtggtgattggctgtggggttaacggctaaaaggggcggtgcgaccgtgggaaaatgacgttttgtgggggtggagtttttttgcaagttgtcgcgggaaatgtgacgcataaaaaggcttttttctcacggaactacttagttttcccacggtatttaacaggaaatgaggtagttttgaccggatgcaagtgaaaattgttgattttcgcgcgaaaactgaatgaggaagtgtttttctgaataatgtggtatttatggcagggtggagtatttgttcagggccaggtagactttgacccattacgtggaggtttcgattaccgtgttttttacctgaatttccgcgtaccgtgtcaaagtcttctgtttttacgtaggtgtcagctgatcgctagggtatttatacctcagggtttgtgtcaagaggccactcttgagtgccagcgagaagagttttctcctctgcgccggcagtttaataataaaaaaatgagagatttgcgatttctgcctcaggaaataatctctgctgagactggaaatgaaatattggagcttgtggtgcacgccctgatgggagacgatccggagccacctgtgcagctttttgagcctcctacgcttcaggaactgtatgatttagaggtagagggatcggaggattctaatgaggaagctgtaaatggcttttttaccgattctatgcttttagctgctaatgaagggttagaattagatccgcctttggacacttttgatactccaggggtaattgtggaaagcggtacaggtgtaagaaaattacctgatttgagttccgtggactgtgatttgcactgctatgaagacgggtttcctccgagtgatgaggaggaccatgaaaaggagcagtccatgcagactgcagcgggtgagggagtgaaggctgccaatgttggttttcagttggattgcccggagcttcctggacatggctgtaagtcttgtgaatttcacaggaaaaatactggagtaaaggaactgttatgttcgctttgttatatgagaacgcactgccactttatttacagtaagtgtgtttaagttaaaatttaaaggaatatgctgtttttcacatgtatattgagtgtgagttttgtgcttcttattataggtcctgtgtctgatgctgatgaatcaccatctcctgattctactacctcacctcctgagattcaagcacctgttcctgtggacgtgcgcaagcccattcctgtgaagcttaagcctgggaaacgtccagcagtggaaaaacttgaggacttgttacagggtggggacggacctttggacttgagtacacggaaacgtccaagacaataagtgttccatatccgtgtttacttaaggtgacgtcaatatttgtgtgacagtgcaatgtaataaaaatatgttaactgttcactggtttttattgctttttgggcggggactcaggtatataagtagaagcagacctgtgtggttagctcataggagctggctttcatccatggaggtttgggccattttggaagaccttaggaagactaggcaactgttagagaacgcttcggacggagtctccggtttttggagattctggttcgctagtgaattagctagggtagtttttaggataaaacaggactataaacaagaatttgaaaagttgttggtagattgcccaggactttttgaagctcttaatttgggccatcaggttcactttaaagaaaaagttttatcagttttagacttttcaaccccaggtagaactgctgctgctgtggcttttcttacttttatattagataaatggatcccgcagactcatttcagcaggggatacgttttggatttcatagccacagcattgtggagaacatggaaggttcgcaagatgaggacaatcttaggttactggccagtgcagcctttgggtgtagcgggaatcctgaggcatccaccggtcatgccagcggttctggaggaggaacagcaagaggacaacccgagagccggcctggaccctccagtggaggaggcggagtagctgacttgtctcctgaactgcaacgggtgcttactggatctacgtccactggacgggataggggcgttaagagggagagggcatctagtggtactgatgctagatctgagttggctttaagtttaatgagtcgcagacgtcctgaaaccatttggtggcatgaggttcagaaagagggaagggatgaagtttctgtattgcaggagaaatattcactggaacaggtgaaaacatgttggttggagcctgaggatgattgggaggtggccattaaaaattatgccaagatagctttgaggcctgataaacagtataagattactagacggattaatatccggaatgcttgttacatatctggaaatggggctgaggtggtaatagatactcaagacaaggcagttattagatgctgcatgatggatatgtggcctggggtagtcggtatggaagcagtaacttttgtaaatgttaagtttaggggagatggttataatggaatagtgtttatggccaataccaaacttatattgcatggttgtagcttttttggtttcaacaatacctgtgtagatgcctggggacaggttagtgtacggggatgtagtttctatgcgtgttggattgccacagctggcagaaccaagagtcaattgtctctgaagaaatgcatatttcaaagatgtaacctgggcattctgaatgaaggcgaagcaagggtccgccactgcgcttctacagatactggatgttttattttgattaagggaaatgccagcgtaaagcataacatgatttgcggtgcttccgatgagaggccttatcaaatgctcacttgtgctggtgggcattgtaatatgctggctactgtgcatattgtttcccatcaacgcaaaaaatggcctgtttttgatcacaatgtgatgacgaagtgtaccatgcatgcaggtgggcgtagaggaatgtttatgccttaccagtgtaacatgaatcatgtgaaagtgttgttggaaccagatgccttttccagaatgagcctaacaggaatttttgacatgaacatgcaaatctggaagatcctgaggtatgatgatacgagatcgagggtacgcgcatgcgaatgcggaggcaagcatgccaggttccagccggtgtgtgtagatgtgactgaagatctcagaccggatcatttggttattgcccgcactggagcagagttcggatccagtggagaagaaactgactaaggtgagtattgggaaaactttggggtgggattttcagatggacagattgagtaaaaatttgttttttctgtcttgcagctgtcatgagtggaaacgcttcttttaaggggggagtcttcagcccttatctgacagggcgtctcccatcctgggcaggagttcgtcagaatgttatgggatctactgtggatggaagacccgtccaacccgccaattcttcaacgctgacctatgctactttaagttcttcacctttggacgcagctgcagctgccgccgccgcttctgttgccgctaacactgtgcttggaatgggttactatggaagcatcatggctaattccacttcctctaataacccttctaccctgactcaggacaagttacttgtccttttggcccagctggaggctttgacccaacgtctgggtgaactttctcagcaggtggtcgagttgcgagtacaaactgagtctgctgtcggcacggcaaagtctaaataaaaaaatcccagaatcaatgaataaataaacaagcttgttgttgatttaaaatcaagtgtttttatttcatttttcgcgcacggtatgccctagaccaccgatctctatcattgagaactcggtggattttttccaggatcctatagaggtgggattgaatgtttagatacatgggcattaggccgtctttggggtggagatagctccattgaagggattcatgctccggggtagtgttgtaaatcacccagtcataacaaggtcgcagtgcatggtgttgcacaatatcttttagaagtaggctgattgccacagataagcccttggtgtaggtgtttacaaaccggttgagctgggatgggtgcattcggggtgaaattatgtgcattttggattggatttttaagttggcaatattgccgccaagatcccgtcttgggttcatgttatgaaggaccaccaagacggtgtatccggtacatttaggaaatttatcgtgcagcttggatggaaaagcgtggaaaaatttggagacacccttgtgtcctccaagattttccatgcactcatccatgataatagcaatggggccgtgggcagcggcgcgggcaaacacgttccgtgggtctgacacatcatagttatgttcctgagttaaatcatcataagccattttaatgaatttggggcggagagtaccagattggggtatgaatgttccttcgggccccggagcatagttcccctcacagatttgcatttcccaagctttcagttccgagggtggaatcatgtccacctggggggctatgaaaaacaccgtttctggggcgggggtgattaattgtgatgatagcaaatttctgagcaattgagatttgccacatccggtggggccataaatgattccgattacgggttgcaggtggtagtttagggaacggcaactgccgtcttctcgaagcaagggggccacctcgttcatcatttcccttacatgcatattttcccgcaccaaatccattaggaggcgctctcctcctagtgatagaagttcttgtagtgaggaaaagtttttcagcggtttcagaccgtcagccatgggcattttggagagagtttgctgcaaaagttctagtctgttccacagttcagtgatgtgttctatggcatctcgatccagcagacctcctcgtttcgcgggtttggacggctcctggaatagggtatgagacgatgggcgtccagcgctgccagggttcggtccttccagggtctcagtgttcgagtcagggttgtttccgtcacagtgaaggggtgtgcgcctgcttgggcgcttgccagggtgcgcttcagactcatcctgctggtcgaaaacttctgtcgcttggcgccctgtatgtcggccaagtagcagtttaccatgagttcgtagttgagcgcctcggctgcgtggcctttggcgcggagcttacctttggaagttttcttgcataccgggcagtataggcatttcagcgcatacaacttgggcgcaaggaaaacggattctggggagtatgcatctgcgccgcaggaggcgcaaacagtttcacattccaccagccaggttaaatccggttcattggggtcaaaaacaagttttccgccatattttttgatgcgtttcttacctttggtctccatgagttcgtgtcctcgttgagtgacaaacaggctgtccgtgtccccgtagactgattttacaggcctcttctccagtggagtgcctcggtcttcttcgtacaggaactctgaccactctgatacaaaggcgcgcgtccaggccagcacaaaggaggctatgtgggaggggtagcgatcgttgtcaaccagggggtccaccttttccaaagtatgcaaacacatgtcaccctcttcaacatccaggaatgtgattggcttgtaggtgtatttcacgtgacctggggtccccgctgggggggtataaaagggggcggttctttgctcttcctcactgtcttccggatcgctgtccaggaacgtcagctgttggggtaggtattccctctcgaaggcgggcatgacctctgcactcaggttgtcagtttctaagaacgaggaggatttgatattgacagtgccggttgagatgcctttcatgaggttttcgtccatctggtcagaaaacacaatttttttattgtcaagtttggtggcaaatgatccatacagggcgttggataaaagtttggcaatggatcgcatggtttggttcttttccttgtccgcgcgctctttggcggcgatgttgagttggacatactcgcgtgccaggcacttccattcggggaagatagttgttaattcatctggcacgattctcacttgccaccctcgattatgcaaggtaattaaatccacactggtggccacctcgcctcgaaggggttcattggtccaacagagcctacctcctttcctagaacagaaagggggaagtgggtctagcataagttcatcgggagggtctgcatccatggtaaagattcccggaagtaaatccttatcaaaatagctgatgggagtggggtcatctaaggccatttgccattctcgagctgccagtgcgcgctcatatgggttaaggggactgccccatggcatgggatgggtgagtgcagaggcatacatgccacagatgtcatagacgtagatgggatcctcaaagatgcctatgtaggttggatagcatcgcccccctctgatacttgctcgcacatagtcatatagttcatgtgatggcgctagcagccccggacccaagttggtgcgattgggtttttctgttctgtagacgatctggcgaaagatggcgtgagaattggaagagatggtgggtctttgaaaaatgttgaaatgggcatgaggtagacctacagagtctctgacaaagtgggcataagattcttgaagcttggttaccagttcggcggtgacaagtacgtctagggcgcagtagtcaagtgtttcttgaatgatgtcataacctggttggtttttcttttcccacagttcgcggttgagaaggtattcttcgcgatccttccagtactcttctagcggaaacccgtctttgtctgcacggtaagatcctagcatgtagaactgattaactgccttgtaagggcagcagcccttctctacgggtagagagtatgcttgagcagcttttcgtagcgaagcgtgagtaagggcaaaggtgtctctgaccatgactttgaggaattggtatttgaagtcgatgtcgtcacaggctccctgttcccagagttggaagtctacccgtttcttgtaggcggggttgggcaaagcgaaagtaacatcattgaagagaatcttgccggccctgggcatgaaattgcgagtgatgcgaaaaggctgtggtacttccgctcggttattgataacctgggcagctaggacgatctcgtcgaaaccgttgatgttgtgtcctacgatgtataattctatgaaacgcggcgtgcctctgacgtgaggtagcttactgagctcatcaaaggttaggtctgtggggtcagataaggcgtagtgttcgagagcccattcgtgcaggtgaggattcgctttaaggaaggaggaccagaggtccactgccagtgctgtttgtaactggtcccggtactgacgaaaatgccgtccgactgccattttttctggggtgacgcaatagaaggtttgggggtcctgccgccagcgatcccacttgagttttatggcgaggtcataggcgatgttgacgagccgctggtctccagagagtttcatgaccagcatgaaggggattagctgcttgccaaaggaccccatccaggtgtaggtttccacatcgtaggtgagaaagagcctttctgtgcgaggatgagagccaatcgggaagaactggatctcctgccaccagttggaggaatggctgttgatgtgatggaagtagaactccctgcgacgcgccgagcattcatgcttgtgcttgtacagacggccgcagtagtcgcagcgttgcacgggttgtatctcgtgaatgagttgtacctggcttcccttgacgagaaatttcagtgggaagccgaggcctggcgattgtatctcgtgctttactatgttgtctgcatcggcctgttcatcttctgtctcgatggtggtcatgctgacgagccctcgcgggaggcaagtccagacctcggcgcggcaggggcggagctcgaggacgagagcgcgcaggctggagctgtccagggtcctgagacgctgcggactcaggttagtaggcagtgtcaggagattaacttgcatgatcttttggagggcgtgcgggaggttcagatagtacttgatctcaacgggtccgttggtggagatgtcgatggcttgcagggttccgtgtcccttgggcgctaccaccgtgcccttgtttttcattttggacggcggtggctctgttgcttcttgcatgtttagaagcggtgtcgagggcgcgcaccgggcggcaggggcggctcgggacccggcggcatggctggcagtggtacgtcggcgccgcgcgcgggtaggttctggtactgcgccctgagaagactcgcatgcgcgacgacgcggcggttgacatcctggatctgacgcctctgggtgaaagctaccggccccgtgagcttgaacctgaaagagagttcaacagaatcaatctcggtatcgttgacggcggcttgcctaaggatttcttgcacgtcaccagagttgtcctggtaggcgatctccgccatgaactgctcgatctcttcctcttgaagatctccgcggcccgctctctcgacggtggccgcgaggtcgttggagatgcgcccaatgagttgagagaatgcattcatgcccgcctcgttccagacgcggctgtagaccacggcccccacgggatctctcgcgcgcatgaccacctgggcgaggttgagctccacgtggcgggtgaagaccgcatagttgcataggcgctggaaaaggtagttgagtgtggtggcgatgtgctcggtgacgaagaaatacatgatccatcgtctcagcggcatctcgctgacatcgcccagagcttccaagcgctccatggcctcgtagaagtccacggcaaaattaaaaaactgggagtttcgcgcggacacggtcaactcctcttccagaagacggataagttcggcgatggtggtgcgcacctcgcgctcgaaagcccctgggatttcttcctcaatctcttcttcttccactaacatctcttcctcttcaggtggggctgcaggaggagggggaacgcggcgacgccggcggcgcacgggcagacggtcgatgaatctttcaatgacctctccgcggcggcggcgcatggtttcagtgacggcgcggccgttctcgcgcggtcgcagagtaaaaacaccgccgcgcatctccttaaagtggtgactgggaggttctccgtttgggagggagagggcgctgattatacattttattaattggcccgtagggactgcacgcagagatctgatcgtgtcaagatccacgggatctgaaaacctttcgacgaaagcgtctaaccagtcacagtcacaaggtaggctgagtacggcttcttgtgggcgggggtggttatgtgttcggtctgggtcttctgtttcttcttcatctcgggaaggtgagacgatgctgctggtgatgaaattaaagtaggcagttctaagacggcggatggtggcgaggagcaccaggtctttgggtccggcttgctggatacgcaggcgattggccattccccaagcattatcctgacatctagcaagatctttgtagtagtcttgcatgagccgttctacgggcacttcttcctcacccgttctgccatgcatacgtgtgagtccaaatccgcgcattggttgtaccagtgccaagtcagctacgactctttcggcgaggatggcttgctgtacttgggtaagggtggcttgaaagtcatcaaaatccacaaagcggtggtaagctcctgtattaatggtgtaagcacagttggccatgactgaccagttaactgtctggtgaccagggcgcacgagctcggtgtatttaaggcgcgaataggcgcgggtgtcaaagatgtaatcgttgcaggtgcgcaccagatactggtaccctataagaaaatgcggcggtggttggcggtagagaggccatcgttctgtagctggagcgccaggggcgaggtcttccaacataaggcggtgatagccgtagatgtacctggacatccaggtgattcctgcggcggtagtagaagcccgaggaaactcgcgtacgcggttccaaatgttgcgtagcggcatgaagtagttcattgtaggcacggtttgaccagtgaggcgcgcgcagtcattgatgctctatagacacggagaaaatgaaagcgttcagcgactcgactccgtagcctggaggaacgtgaacgggttgggtcgcggtgtaccccggttcgagacttgtactcgagccggccggagccgcggctaacgtggtattggcactcccgtctcgacccagcctacaaaaatccaggatacggaatcgagtcgttttgctggtttccgaatggcagggaagtgagtcctattttttttttttgccgctcagatgcatcccgtgctgcgacagatgcgcccccaacaacagcccccctcgcagcagcagcagcagcaatcacaaaaggctgtccctgcaactactgcaactgccgccgtgagcggtgcgggacagcccgcctatgatctggacttggaagagggcgaaggactggcacgtctaggtgcgccttcacccgagcggcatccgcgagttcaactgaaaaaagattctcgcgaggcgtatgtgccccaacagaacctatttagagacagaagcggcgaggagccggaggagatgcgagcttcccgctttaacgcgggtcgtgagctgcgtcacggtttggaccgaagacgagtgttgcgggacgaggatttcgaagttgatgaaatgacagggatcagtcctgccagggcacacgtggctgcagccaaccttgtatcggcttacgagcagacagtaaaggaagagcgtaacttccaaaagtcttttaataatcatgtgcgaaccctgattgcccgcgaagaagttacccttggtttgatgcatttgtgggatttgatggaagctatcattcagaaccctactagcaaacctctgaccgcccagctgtttctggtggtgcaacacagcagagacaatgaggctttcagagaggcgctgctgaacatcaccgaacccgaggggagatggttgtatgatcttatcaacattctacagagtatcatagtgcaggagcggagcctgggcctggccgagaaggtggctgccatcaattactcggttttgagcttgggaaaatattacgctcgcaaaatctacaagactccatacgttcccatagacaaggaggtgaagatagatgggttctacatgcgcatgacgctcaaggtcttgaccctgagcgatgatcttggggtgtatcgcaatgacagaatgcatcgcgcggttagcgccagcaggaggcgcgagttaagcgacagggaactgatgcacagtttgcaaagagctctgactggagctggaaccgagggtgagaattacttcgacatgggagctgacttgcagtggcagcctagtcgcagggctctgagcgccgcgacggcaggatgtgagcttccttacatagaagaggcggatgaaggcgaggaggaagagggcgagtacttggaagactgatggcacaacccgtgttttttgctagatggaacagcaagcaccggatcccgcaatgcgggcggcgctgcagagccagccgtccggcattaactcctcggacgattggacccaggccatgcaacgtatcatggcgttgacgactcgcaaccccgaagcctttagacagcaaccccaggccaaccgtctatcggccatcatggaagctgtagtgccttcccgctctaatcccactcatgagaaggtcctggccatcgtgaacgcgttggtggagaacaaagctattcgtccagatgaggccggactggtatacaacgctctcttagaacgcgtggctcgctacaacagtagcaatgtgcaaaccaatttggaccgtatgataacagatgtacgcgaagccgtgtctcagcgcgaaaggttccagcgtgatgccaacctgggttcgctggtggcgttaaatgctttcttgagtactcagcctgctaatgtgccgcgtggtcaacaggattatactaactttttaagtgctttgagactgatggtatcagaagtacctcagagcgaagtgtatcagtccggtcctgattacttctttcagactagcagacagggcttgcagacggtaaatctgagccaagcttttaaaaaccttaaaggtttgtggggagtgcatgccccggtaggagaaagagcaaccgtgtctagcttgttaactccgaactcccgcctattattactgttggtagctcctttcaccgacagcggtagcatcgaccgtaattcctatttgggttacctactaaacctgtatcgcgaagccatagggcaaagtcaggtggacgagcagacctatcaagaaattacccaagtcagtcgcgctttgggacaggaagacactggcagtttggaagccactctgaacttcttgcttaccaatcggtctcaaaagatccctcctcaatatgctcttactgcggaggaggagaggatccttagatatgtgcagcagagcgtgggattgtttctgatgcaagagggggcaactccgactgcagcactggacatgacagcgcgaaatatggagcccagcatgtatgccagtaaccgacctttcattaacaaactgctggactacttgcacagagctgccgctatgaactctgattatttcaccaatgccatcttaaacccgcactggctgcccccacctggtttctacacgggcgaatatgacatgcccgaccctaatgacggatttctgtgggacgacgtggacagcgatgttttttcacctctttctgatcatcgcacgtggaaaaaggaaggcggcgatagaatgcattcttctgcatcgctgtccggggtcatgggtgctaccgcggctgagcccgagtctgcaagtccttttcctagtctacccttttctctacacagtgtacgtagcagcgaagtgggtagaataagtcgcccgagtttaatgggcgaagaggagtatctaaacgattccttgctcagaccggcaagagaaaaaaatttcccaaacaatggaatagaaagtttggtggataaaatgagtagatggaagacttatgctcaggatcacagagacgagcctgggatcatggggattacaagtagagcgagccgtagacgccagcgccatgacagacagaggggtcttgtgtgggacgatgaggattcggccgatgatagcagcgtgctggacttgggtgggagaggaaggggcaacccgtttgctcatttgcgccctcgcttgggtggtatgttgtaaaaaaaaataaaaaaaaaactcaccaaggccatggcgacgagcgtacgttcgttcttctttattatctgtgtctagtataatgaggcgagtcgtgctaggcggagcggtggtgtatccggagggtcctcctccttcgtacgagagcgtgatgcagcagcagcaggcgacggcggtgatgcaatccccactggaggctccctttgtgcctccgcgatacctggcacctacggagggcagaaacagcattcgttattcggaactggcacctcagtacgataccaccaggttgtatctggtggacaacaagtcggcggacattgcttctctgaactatcagaatgaccacagcaacttcttgaccacggtggtgcaaaacaatgactttacccctacggaagccagcacccagaccattaactttgatgaacgatcgcggtggggcggtcagctaaagaccatcatgcatactaacatgccaaacgtgaacgagtatatgtttagtaacaagttcaaagcgcgtgtgatggtgtccagaaaacctcccgacggtgctgcagttggggatacttatgatcacaagcaggatattttgaaatatgagtggttcgagtttactttgccagaaggcaacttttcagttactatgactattgatttgatgaacaatgccatcatagataattacttgaaagtgggtagacagaatggagtgcttgaaagtgacattggtgttaagttcgacaccaggaacttcaagctgggatgggatcccgaaaccaagttgatcatgcctggagtgtatacgtatgaagccttccatcctgacattgtcttactgcctggctgcggagtggattttaccgagagtcgtttgagcaaccttcttggtatcagaaaaaaacagccatttcaagagggttttaagattttgtatgaagatttagaaggtggtaatattccggccctcttggatgtagatgcctatgagaacagtaagaaagaacaaaaagccaaaatagaagctgctacagctgctgcagaagctaaggcaaacatagttgccagcgactctacaagggttgctaacgctggagaggtcagaggagacaattttgcgccaacacctgttccgactgcagaatcattattggccgatgtgtctgaaggaacggacgtgaaactcactattcaacctgtagaaaaagatagtaagaatagaagctataatgtgttggaagacaaaatcaacacagcctatcgcagttggtatctttcgtacaattatggcgatcccgaaaaaggagtgcgttcctggacattgctcaccacctcagatgtcacctgcggagcagagcaggtctactggtcgcttccagacatgatgaaggatcctgtcactttccgctccactagacaagtcagtaactaccctgtggtgggtgcagagcttatgcccgtcttctcaaagagcttctacaacgaacaagctgtgtactcccagcagctccgccagtccacctcgcttacgcacgtcttcaaccgctttcctgagaaccagattttaatccgtccgccggcgcccaccattaccaccgtcagtgaaaacgttcctgctctcacagatcacgggaccctgccgttgcgcagcagtatccggggagtccaacgtgtgaccgttactgacgccagacgccgcacctgtccctacgtgtacaaggcactgggcatagtcgcaccgcgcgtcctttcaagccgcactttctaaaaaaaaaaaaaatgtccattcttatctcgcccagtaataacaccggttggggtctgcgcgctccaagcaagatgtacggaggcgcacgcaaacgttctacccaacatcctgtccgtgttcgcggacattttcgcgctccatggggcgccctcaagggccgcactcgcgttcgaaccaccgtcgatgatgtaatcgatcaggtggttgccgacgcccgtaattatactcctactgcgcctacatctactgtggatgcagttattgacagtgtagtggctgacgctcgcaactatgctcgacgtaagagccggcgaaggcgcattgccagacgccaccgagctaccactgccatgcgagccgcaagagctctgctacgaagagctagacgcgtggggcgaagagccatgcttagggcggccagacgtgcagcttcgggcgccagcgccggcaggtcccgcaggcaagcagccgctgtcgcagcggcgactattgccgacatggcccaatcgcgaagaggcaatgtatactgggtgcgtgacgctgccaccggtcaacgtgtacccgtgcgcacccgtccccctcgcacttagaagatactgagcagtctccgatgttgtgtcccagcggcgaggatgtccaagcgcaaatacaaggaagaaatgctgcaggttatcgcacctgaagtctacggccaaccgttgaaggatgaaaaaaaaccccgcaaaatcaagcgggttaaaaaggacaaaaaagaagaggaagatggcgatgatgggctggcggagtttgtgcgcgagtttgccccacggcgacgcgtgcaatggcgtgggcgcaaagttcgacatgtgttgagacctggaacttcggtggtctttacacccggcgagcgttcaagcgctacttttaagcgttcctatgatgaggtgtacggggatgatgatattcttgagcaggcggctgaccgattaggcgagtttgcttatggcaagcgtagtagaataacttccaaggatgagacagtgtcgatacccttggatcatggaaatcccacccctagtcttaaaccggtcactttgcagcaagtgttacccgtaactccgcgaacaggtgttaaacgcgaaggtgaagatttgtatcccactatgcaactgatggtacccaaacgccagaagttggaggacgttttggagaaagtaaaagtggatccagatattcaacctgaggttaaagtgagacccattaagcaggtagcgcctggtctgggggtacaaactgtagacattaagattcccactgaaagtatggaagtgcaaactgaacccgcaaagcctactgccacctccactgaagtgcaaacggatccatggatgcccatgcctattacaactgacgccgccggtcccactcgaagatcccgacgaaagtacggtccagcaagtctgttgatgcccaattatgttgtacacccatctattattcctactcctggttaccgaggcactcgctactatcgcagccgaaacagtacctcccgccgtcgccgcaagacacctgcaaatcgcagtcgtcgccgtagacgcacaagcaaaccgactcccggcgccctggtgcggcaagtgtaccgcaatggtagtgcggaacctttgacactgccgcgtgcgcgttaccatccgagtatcatcacttaatcaatgttgccgctgcctccttgcagatatggccctcacttgtcgccttcgcgttcccatcactggttaccgaggaagaaactcgcgccgtagaagagggatgttgggacgcggaatgcgacgctacaggcgacggcgtgctatccgcaagcaattgcggggtggttttttaccagccttaattccaattatcgctgctgcaattggcgcgataccaggcatagcttccgtggcggttcaggcctcgcaacgacattgacattggaaaaaaacgtataaataaaaaaaaaaaaatacaatggactctgacactcctggtcctgtgactatgttttcttagagatggaagacatcaatttttcatccttggctccgcgacacggcacgaagccgtacatgggcacctggagcgacatcggcacgagccaactgaacgggggcgccttcaattggagcagtatctggagcgggcttaaaaattttggctcaaccataaaaacatacgggaacaaagcttggaacagcagtacaggacaggcgcttagaaataaacttaaagaccagaacttccaacaaaaagtagtcgatgggatagcttccggcatcaatggagtggtagatttggctaaccaggctgtgcagaaaaagataaacagtcgtttggacccgccgccagcaaccccaggtgaaatgcaagtggaggaagaaattcctccgccagaaaaacgaggcgacaagcgtccgcgtcccgatttggaagagacgctggtgacgcgcgtagatgaaccgccttcttatgaggaagcaacgaagcttggaatgcccaccactagaccgatagccccaatggccaccggggtgatgaaaccttctcagttgcatcgacccgtcaccttggatttgccccctccccctgctgctactgctgtacccgcttctaagcctgtcgctgccccgaaaccagtcgccgtagccaggtcacgtcccgggggcgctcctcgtccaaatgcgcactggcaaaatactctgaacagcatcgtgggtctaggcgtgcaaagtgtaaaacgccgtcgctgcttttaattaaatatggagtagcgcttaacttgcctatctgtgtatatgtgtcattacacgccgtcacagcagcagaggaaaaaaggaagaggtcgtgcgtcgacgctgagttactttcaagatggccaccccatcgatgctgccccaatgggcatacatgcacatcgccggacaggatgcttcggagtacctgagtccgggtctggtgcagttcgcccgcgccacagacacctacttcaatctgggaaataagtttagaaatcccaccgtagcgccgacccacgatgtgaccaccgaccgtagccagcggctcatgttgcgcttcgtgcccgttgaccgggaggacaatacatactcttacaaagtgcggtacaccctggccgtgggcgacaacagagtgctggatatggccagcacgttctttgacattaggggtgtgttggacagaggtcccagtttcaaaccctattctggtacggcttacaactccctggctcctaaaggcgctccaaatacatctcagtggattgcagaaggtgtaaaaaatacaactggtgaggaacacgtaacagaagaggaaaccaatactactacttacacttttggcaatgctcctgtaaaagctgaagctgaaattacaaaagaaggactcccagtaggtttggaagtttcagatgaagaaagtaaaccgatttatgctgataaaacatatcagccagaacctcagctgggagatgaaacttggactgaccttgatggaaaaaccgaaaagtatggaggcagggctctcaaacccgatactaagatgaaaccatgctacgggtcctttgccaaacctactaatgtgaaaggcggtcaggcaaaacaaaaaacaacggagcagccaaatcagaaagtcgaatatgatatcgacatggagttttttgatgcggcatcgcagaaaacaaacttaagtcctaaaattgtcatgtatgcagaaaatgtaaatttggaaactccagacactcatgtagtgtacaaacctggaacagaagacacaagttccgaagctaatttgggacaacaatctatgcccaacagacccaactacattggcttcagagataactttattggacttatgtactataacagtactggtaacatgggggtgctggctggtcaagcgtctcagttaaatgcagtggttgacttgcaggacagaaacacagaactttcttaccaactcttgcttgactctctgggcgacagaaccagatactttagcatgtggaatcaggctgtggacagttatgatcctgatgtacgtgttattgaaaatcatggtgtggaagatgaacttcccaactactgttttccactggacggcataggtgttccaacaaccagttacaaatcaatagttccaaatggagacaatgcgcctaattggaaggaacctgaagtaaatggaacaagtgagatcggacagggtaatttgtttgccatggaaattaaccttcaagccaatctatggcgaagtttcctttattccaatgtggctctatatctcccagactcgtacaaatacaccccgtccaatgtcactcttccagaaaacaaaaacacctacgactacatgaacgggcgggtggtgccgccatctctagtagacacctatgtgaacattggtgccaggtggtctctggatgccatggacaatgtcaacccattcaaccaccaccgtaacgctggcttgcgttaccgatccatgcttctgggtaacggacgttatgtgcctttccacatacaagtgcctcaaaaattcttcgctgttaaaaacctgctgcttctcccaggctcctacacttatgagtggaactttaggaaggatgtgaacatggttctacagagttccctcggtaacgacctgcgggtagatggcgccagcatcagtttcacgagcatcaacctctatgctacttttttccccatggctcacaacaccgcttccacccttgaagccatgctgcggaatgacaccaatgatcagtcattcaacgactacctatctgcagctaacatgctctaccccattcctgccaatgcaaccaatattcccatttccattccttctcgcaactgggcggctttcagaggctggtcatttaccagactgaaaaccaaagaaactccctctttggggtctggatttgacccctactttgtctattctggttctattccctacctggatggtaccttctacctgaaccacacttttaagaaggtttccatcatgtttgactcttcagtgagctggcctggaaatgacaggttactatctcctaacgaatttgaaataaagcgcactgtggatggcgaaggctacaacgtagcccaatgcaacatgaccaaagactggttcttggtacagatgctcgccaactacaacatcggctatcagggcttctacattccagaaggatacaaagatcgcatgtattcatttttcagaaacttccagcccatgagcaggcaggtggttgatgaggtcaattacaaagacttcaaggccgtcgccataccctaccaacacaacaactctggctttgtgggttacatggctccgaccatgcgccaaggtcaaccctatcccgctaactatccctatccactcattggaacaactgccgtaaatagtgttacgcagaaaaagttcttgtgtgacagaaccatgtggcgcataccgttctcgagcaacttcatgtctatgggggcccttacagacttgggacagaatatgctctatgccaactcagctcatgctctggacatgacctttgaggtggatcccatggatgagcccaccctgctttatcttctcttcgaagttttcgacgtggtcagagtgcatcagccacaccgcggcatcatcgaggcagtctacctgcgtacaccgttctcggccggtaacgctaccacgtaagaagcttcttgcttcttgcaaatagcagctgcaaccatggcctgcggatcccaaaacggctccagcgagcaagagctcagagccattgtccaagacctgggttgcggaccctattttttgggaacctacgataagcgcttcccggggttcatggcccccgataagctcgcctgtgccattgtaaatacggccggacgtgagacggggggagagcactggttggctttcggttggaacccacgttctaacacctgctacctttttgatccttttggattctcggatgatcgtctcaaacagatttaccagtttgaatatgagggtctcctgcgccgcagcgctcttgctaccaaggaccgctgtattacgctggaaaaatctacccagaccgtgcagggtccccgttctgccgcctgcggacttttctgctgcatgttccttcacgcctttgtgcactggcctgaccgtcccatggacggaaaccccaccatgaaattgctaactggagtgccaaacaacatgcttcattctcctaaagtccagcccaccctgtgtgacaatcaaaaagcactctaccattttcttaatacccattcgccttattttcgctcccatcgtacacacatcgaaagggccactgcgttcgaccgtatggatgttcaataatgactcatgtaaacaacgtgttcaataaacatcactttatttttttacatgtatcaaggctctgcattacttatttatttacaagtcgaatgggttctgacgagaatcagaatgacccgcaggcagtgatacgttgcggaactgatacttgggttgccacttgaattcgggaatcaccaacttgggaaccggtatatcgggcaggatgtcactccacagctttctggtcagctgcaaagctccaagcaggtcaggagccgaaatcttgaaatcacaattaggaccagtgctttgagcgcgagagttgcggtacaccggattgcagcactgaaacaccatcagcgacggatgtctcacgcttgccagcacggtgggatctgcaatcatgcccacatccagatcttcagcattggcaatgctgaacggggtcatcttgcaggtctgcctacccatggcgggcacccaattaggcttgtggttgcaatcgcagtgcagggggatcagtatcatcttggcctgatcctgtctgattcctggatacacggctctcatgaaagcatcatattgcttgaaagcctgctgggctttactaccctcggtataaaacatcccgcaggacctgctcgaaaactggttagctgcacagccggcatcattcacacagcagcgggcgtcattgttagctatttgcaccacacttctgccccagcggttttgggtgattttggttcgctcgggattctcctttaaggctcgttgtccgttctcgctggccacatccatctcgataatctgctccttctgaatcataatattgccatgcaggcacttcagcttgccctcataatcattgcagccatgaggccacaacgcacagcctgtacattcccaattatggtgggcgatctgagaaaaagaatgtatcattccctgcagaaatcttcccatcatcgtgctcagtgtcttgtgactagtgaaagttaactggatgcctcggtgctcctcgtttacgtactggtgacagatgcgcttgtattgttcgtgttgctcaggcattagtttaaaagaggttctaagttcgttatccagcctgtacttctccatcagcagacacatcacttccatgcctttctcccaagcagacaccaggggcaagctaatcggattcttaacagtgcaggcagcagctcctttagccagagggtcatctttagcgatcttctcaatgcttcttttgccatccttctcaacgatgcgcacgggcgggtagctgaaacccactgctacaagttgcgcctcttctctttcttcttcgctgtcttgactgatgtcttgcatggggatatgtttggtcttccttggcttctttttggggggtatcggaggaggaggactgtcgctccgttccggagacagggaggattgtgacgtttcgctcaccattaccaactgactgtcggtagaagaacctgaccccacacggcgacaggtgtttctcttcgggggcagaggtggaggcgattgcgaagggctgcggtccgacctggaaggcggatgactggcagaaccccttccgcgttcgggggtgtgctccctgtggcggtcgcttaactgatttccttcgcggctggccattgtgttctcctaggcagagaaacaacagacatggaaactcagccattgctgtcaacatcgccacgagtgccatcacatctcgtcctcagcgacgaggaaaaggagcagagcttaagcattccaccgcccagtcctgccaccacctctaccctagaagataaggaggtcgacgcatctcatgacatgcagaataaaaaagcgaaagagtctgagacagacatcgagcaagacccgggctatgtgacaccggtggaacacgaggaagagttgaaacgctttctagagagagaggatgaaaactgcccaaaacaacgagcagataactatcaccaagatgctggaaatagggatcagaacaccgactacctcatagggcttgacggggaagacgcgctccttaaacatctagcaagacagtcgctcatagtcaaggatgcattattggacagaactgaagtgcccatcagtgtggaagagctcagccgcgcctacgagcttaacctcttttcacctcgtactccccccaaacgtcagccaaacggcacctgcgagccaaatcctcgcttaaacttttatccagcttttgctgtgccagaagtactggctacctatcacatcttttttaaaaatcaaaaaattccagtctcctgccgcgctaatcgcacccgcgccgatgccctactcaatctgggacctggttcacgcttacctgatatagcttccttggaagaggttccaaagatcttcgagggtctgggcaataatgagactcgggccgcaaatgctctgcaaaagggagaaaatggcatggatgagcatcacagcgttctggtggaattggaaggcgataatgccagactcgcagtactcaagcgaagcatcgaggtcacacacttcgcatatcccgctgtcaacctgccccctaaagtcatgacggcggtcatggaccagttactcattaagcgcgcaagtcccctttcagaagacatgcatgacccagatgcctgtgatgagggtaaaccagtggtcagtgatgagcagctaacccgatggctgggcaccgactctcccagggatttggaagagcgtcgcaagcttatgatggccgtggtgctggttaccgtagaactagagtgtctccgacgtttctttaccgattcagaaaccttgcgcaaactcgaagagaatctgcactacacttttagacacggctttgtgcggcaggcatgcaagatatctaacgtggaactcaccaacctggtttcctacatgggtattctgcatgagaatcgcctaggacaaagcgtgctgcacagcaccctgaagggggaagcccgccgtgattacatccgcgattgtgtctatctgtacctgtgccacacgtggcaaaccggcatgggtgtatggcagcaatgtttagaagaacagaacttgaaagagcttgacaagctcttacagaaatctcttaaggttctgtggacagggttcgacgagcgcaccgtcgcttccgacctggcagacctcatcttcccagagcgtctcagggttactttgcgaaacggattgcctgactttatgagccagagcatgcttaacaattttcgctctttcatcctggaacgctccggtatcctgcccgccacctgctgcgcactgccctccgactttgtgcctctcacctaccgcgagtgccccccgccgctatggagtcactgctacctgttccgtctggccaactatctctcctaccactcggatgtgatcgaggatgtgagcggagacggcttgctggagtgtcactgccgctgcaatctgtgcacgccccaccggtccctagcttgcaacccccagttgatgagcgaaacccagataataggcacctttgaattgcaaggccccagcagccaaggcgatgggtcttctcctgggcaaagtttaaaactgaccccgggactgtggacctccgcctacttgcgcaagtttgctccggaagattaccacccctatgaaatcaagttctatgaggaccaatcacagcctccaaaggccgaactttcggcctgcgtcatcacccagggggcaattctggcccaattgcaagccatccaaaaatcccgccaagaatttctactgaaaaagggtaagggggtctaccttgacccccagaccggcgaggaactcaacacaaggttccctcaggatgtcccaacgacgagaaaacaagaagttgaaggtgcagccgccgcccccagaagatatggaggaagattgggacagtcaggcagaggaggcggaggaggacagtctggaggacagtctggaggaagacagtttggaggaggaaaacgaggaggcagaggaggtggaagaagtaaccgccgacaaacagttatcctcggctgcggagacaagcaacagcgctaccatctccgctccgagtcgaggaacccggcggcgtcccagcagtagatgggacgagaccggacgcttcccgaacccaaccagcgcttccaagaccggtaagaaggatcggcagggatacaagtcctggcgggggcataagaatgccatcatctcctgcttgcatgagtgcgggggcaacatatccttcacgcggcgctacttgctattccaccatggggtgaactttccgcgcaatgttttgcattactaccgtcacctccacagcccctactatagccagcaaatcccggcagtctcgacagataaagacagcggcggcgacctccaacagaaaaccagcagcggcagttagaaaatacacaacaagtgcagcaacaggaggattaaagattacagccaacgagccagcgcaaacccgagagttaagaaatcggatctttccaaccctgtatgccatcttccagcagagtcggggtcaagagcaggaactgaaaataaaaaaccgatctctgcgttcgctcaccagaagttgtttgtatcacaagagcgaagatcaacttcagcgcactctcgaggacgccgaggctctcttcaacaagtactgcgcgctgactcttaaagagtaggcagcgaccgcgcttattcaaaaaaggcgggaattacatcatcctcgacatgagtaaagaaattcccacgccttacatgtggagttatcaaccccaaatgggattggcggcaggcgcctcccaggactactccacccgcatgaattggctcagcgccgggccttctatgatttctcgagttaatgatatacgcgcctaccgaaaccaaatacttttggaacagtcagctcttaccaccacgccccgccaacaccttaatcccagaaattggcccgccgccctagtgtaccaggaaagtcccgctcccaccactgtattacttcctcgagacgcccaggccgaagtccaaatgactaatgcaggtgcgcagttagctggcggctccaccctatgtcgtcacaggcctcggcataatataaaacgcctgatgatcagaggccgaggtatccagctcaacgacgagtcggtgagctctccgcttggtctacgaccagacggaatctttcagattgccggctgcgggagatcttccttcacccctcgtcaggctgttctgactttggaaagttcgtcttcgcaaccccgctcgggcggaatcgggaccgttcaatttgtggaggagtttactccctctgtctacttcaaccccttctccggatctcctgggcattacccggacgagttcataccgaacttcgacgcgattagcgagtcagtggacggctacgattgatgtctggtgacgcggctgagctatctcggctgcgacatctagaccactgccgccgctttcgctgctttgcccgggaactcattgagttcatctacttcgaactccccaaggatcaccctcaaggtccggcccacggagtgcggatttctatcgaaggcaaaatagactctcgcctgcaacgaattttctcccagcggcccgtgctgatcgagcgagaccagggaaacaccacggtttccatctactgcatttgtaatcaccccggattgcatgaaagcctttgctgtcttatgtgtactgagtttaataaaaactgaattaagactctcctacggactgccgcttcttcaacccggattttacaaccagaagaacgaaacttttcctgtcgtccaggactctgttaacttcacctttcctactcacaaactagaagctcaacgactacaccgcttttccagaagcattttccctactaatactactttcaaaaccggaggtgagctccaaggtcttcctacagaaaacccttgggtggaagcgggccttgtagtgctaggaattcttgcgggtgggcttgtgattattctttgctacctatacacaccttgcttcactttcttagtggtgttgtggtattggtttaaaaaatggggcccatactagtcttgcttgttttactttcgcttttggaaccgggttctgccaattacgatccatgtctagacttcgacccagaaaactgcacacttacttttgcacccgacacaagccgcatctgtggagttcatcgcctctcttacgaacttggcccccaacgacaaaaatttacctgcatggtgggaatcaaccccatagttatcacccagcaaagtggagatactaagggttgcattcactgctcctgcgattccatcgagtgcacctacaccctgctgaagaccctatgcggcctaagagacctgctaccaatgaattaaaaaatgattaataaaaaatcacttacttgaaatcagcaataaggtctctgttgaaattttctcccagcagcacctcacttccctcttcccaactctggtattctaaaccccgttcagcggcatactttctccatactttaaaggggatgtcaaattttagctcctctcctgtacccacaatcttcatgtctttcttcccagatgaccaagagagtccggctcagtgactccttcaaccctgtctacccctatgaagatgaaagcacctcccaacacccctttataaacccagggtttatttccccaaatggcttcacacaaagcccaaacggagttcttactttaaaatgtttaaccccactaacaaccacaggcggatctctacagctaaaagtgggagggggacttacagtggatgacaccaacggttttttgaaagaaaacataagtgccaccacaccactcgttaagactggtcactctataggtttaccactaggagccggattgggaacgaatgaaaataaactttgtatcaaattaggacaaggacttacattcaattcaaacaacatttgcattgatgacaatattaacaccttatggacaggagtcaaccccaccgaagccaactgtcaaatcatgaactccagtgaatctaatgattgcaaattaattctaacactagttaaaactggagcactagtcactgcatttgtttatgttataggagtatctaacaattttaatatgctaactacacacagaaatataaattttactgcagagctgtttttcgattctactggtaatttactaactagactctcatccctcaaaactccacttaatcataaatcaggacaaaacatggctactggtgccattactaatgctaaaggtttcatgcccagcacgactgcctatcctttcaatgataattctagagaaaaagaaaactacatttacggaacttgttactacacagctagtgatcgcactgcttttcccattgacatatctgtcatgcttaaccgaagagcaataaatgacgagacatcatattgtattcgtataacttggtcctggaacacaggagatgccccagaggtgcaaacctctgctacaaccctagtcacctccccatttaccttttactacatcagagaagacgactgacaaataaagtttgcgatcgccaggcccaccatggactggacctggcgcatcctgttcttggtggcagctgctacgggagctcattccaactgggtgaatgtaataagtgatttgaaaaaaattgaagatcttattcaatctatgcatattgatgctactttatatacggaaagtgatgttcaccccagttgcaaagtaacagcaatgaagtgctttctcttggagttacaagttatttcacttgagtccggagatgcaagtattcatgatacagtagaaaatctgatcatcctagcaaacaacagtttgtcttctaatgggaatgtaacagaatctggatgcaaagaatgtgaggaactggaggaaaaaaatattaaagaatttttgcagagttttgtacatattgtccaaatgttcatcaacacttctggaagcggagagggcagaggaagtctgctaacatgcggtgacgtcgaggagaatcctggacctgctcagtcactggctctgagcctccttatcctggttctggcctttggcatccccaggacccaaggcagtgatggaggggctcaggactgttgcctcaagtacagccaaaggaagattcccgccaaggttgtccgcagctaccggaagcaggaaccaagcttaggctgctccatcccagctatcctgttcttgccccgcaagcgctctcaggcagagctatgtgcagacccaaaggagctctgggtgcagcagctgatgcagcatctggacaagacaccatccccacagaaaccagcccagggctgcaggaaggacaggggggcctccaagactggcaagaaaggaaagggctccaaaggctgcaagaggactgagcggtcacagacccctaaagggccaggaagcggagctactaacttcagcctgctgaagcaggctggagacgtggaggagaaccctggacctgccttgacctttgctttactggtggccctcctggtgctcagctgcaagtcaagctgctctgtgggctgtgatctgcctcaaacccacagcctgggtagcaggaggaccttgatgctcctggcacagatgaggagaatctctcttttctcctgcttgaaggacagacatgactttggatttccccaggaggagtttggcaaccagttccaaaaggctgaaaccatccctgtcctccatgagatgatccagcagatcttcaatctcttcagcacaaaggactcatctgctgcttgggatgagaccctcctagacaaattctacactgaactctaccagcagctgaatgacctggaagcctgtgtgatacagggggtgggggtgacagagactcccctgatgaaggaggactccattctggctgtgaggaaatacttccaaagaatcactctctatctgaaagagaagaaatacagcccttgtgcctgggaggttgtcagagcagaaatcatgagatctttttctttgtcaacaaacttgcaagaaagtttaagaagtaaggaaggaagcggacagtgtactaattatgctctcttgaaattggctggagatgttgagagcaaccctggacctaagaaaagtggtgttcttttcctcttgggcatcatcttgctggttctgattggagtgcaaggaaccccagtagtgagaaagggtcgctgttcctgcatcagcaccaaccaagggactatccacctacaatccttgaaagaccttaaacaatttgccccaagcccttcctgcgagaaaattgaaatcattgctacactgaagaatggagttcaaacatgtctaaacccagattcagcagatgtgaaggaactgattaaaaagtgggagaaacaggtcagccaaaagaaaaagcaaaagaatgggaaaaaacatcaaaaaaagaaagttctgaaagttcgaaaatctcaacgttctcgtcaaaagaagactacaggaagcggagtgaaacagactttgaattttgaccttctcaagttggcgggagacgtggagtccaaccctggacctatgtgtcaccagcagttggtcatctcttggttttccctggtttttctggcatctcccctcgtggccatatgggaactgaagaaagatgtttatgtcgtagaattggattggtatccggatgcccctggagaaatggtggtcctcacctgtgacacccctgaagaagatggtatcacctggaccttggaccagagcagtgaggtcttaggctctggcaaaaccctgaccatccaagtcaaagagtttggagatgctggccagtacacctgtcacaaaggaggcgaggttctaagccattcgctcctgctgcttcacaaaaaggaagatggaatttggtccactgatattttaaaggaccagaaagaacccaaaaataagacctttctaagatgcgaggccaagaattattctggacgtttcacctgctggtggctgacgacaatcagtactgatttgacattcagtgtcaaaagcagcagaggctcttctgacccccaaggggtgacgtgcggagctgctacactctctgcagagagagtcagaggggacaacaaggagtatgagtactcagtggagtgccaggaggacagtgcctgcccagctgctgaggagagtctgcccattgaggtcatggtggatgccgttcacaagctcaagtatgaaaactacaccagcagcttcttcatcagggacatcatcaaacctgacccacccaagaacttgcagctgaagccattaaagaattctcggcaggtggaggtcagctgggagtaccctgacacctggagtactccacattcctacttctccctgacattctgcgttcaggtccagggcaagagcaagagagaaaagaaagatagagtcttcacggacaagacctcagccacggtcatctgccgcaaaaatgccagcattagcgtgcgggcccaggaccgctactatagctcatcttggagcgaatgggcatctgtgccctgcagtggagggggcggcagcgggggaggcggcagcggcggcgggggatcgagaaacctccccgtggccactccagacccaggaatgttcccatgccttcaccactcccaaaacctgctgagggccgtcagcaacatgctccagaaggccagacaaactctagaattttacccttgcacttctgaagagattgatcatgaagatatcacaaaagataaaaccagcacagtggaggcctgtttaccattggaattaaccaagaatgagagttgcctaaattccagagagacctctttcataactaatgggagttgcctggcctccagaaagacctcttttatgatggccctgtgccttagtagtatttatgaagacttgaagatgtaccaggtggagttcaagaccatgaatgcaaagcttctgatggatcctaagaggcagatctttctagatcaaaacatgctggcagttattgatgagctgatgcaggccctgaatttcaacagtgagactgtgccacaaaaatcctcccttgaagaaccggatttttataaaactaaaatcaagctctgcatacttcttcatgctttcagaattcgggcagtgactattgatagagtgatgagctatctgaatgcttcctaagctagcttgactgactgagatacagcgtaccttcagctcacagacatgataagatacattgatgagtttggacaaaccacaactagaatgcagtgaaaaaaatgctttatttgtgaaatttgtgatgctattgctttatttgtaaccattataagctgcaataaacaagttaacaacaacaattgcattcattttatgtttcaggttcagggggaggtgtgggaggttttttaaagcaagtaaaacctctacaaatgtggtagtcgtcagctatcctgcaggaacttgtttatttgaaaatcaattcacaaaatccgagtagttattttgcctcccccttcccatttaacagaatacaccaatctctccccacgcacagctttaaacatttggataccattagatatagacatggttttagattccacattccaaacagtttcagagcgagccaatctggggtcagtgatagataaaaatccatcgggatagtcttttaaagcgctttcacagtccaactgctgcggatgcgactccggagtctggatcacggtcatctggaagaagaacgatgggaatcataatccgaaaacggtatcggacgattgtgtctcatcaaacccacaagcagccgctgtctgcgtcgctccgtgcgactgctgtttatgggatcagggtccacagtgtcctgaagcatgattttaatagcccttaacatcaactttctggtgcgatgcgcgcagcaacgcattctgatttcactcaaatctttgcagtaggtacaacacattattacaatattgtttaataaaccataattaaaagcgctccagccaaaactcatatctgatataatcgcccctgcatgaccatcataccaaagtttaatataaattaaatgacgttccctcaaaaacacactacccacatacatgatctcttttggcatgtgcatattaacaatctgtctgtaccatggacaacgttggttaatcatgcaacccaatataaccttccggaaccacactgccaacaccgctcccccagccatgcattgaagtgaaccctgctgattacaatgacaatgaagaacccaattctctcgaccgtgaatcacttgagaatgaaaaatatctatagtggcacaacatagacataaatgcatgcatcttctcataatttttaactcctcaggatttagaaacatatcccagggaataggaagctcttgcagaacagtaaagctggcagaacaaggaagaccacgaacacaacttacactatgcatagtcatagtatcacaatctggcaacagcgggtggtcttcagtcatagaagctcgggtttcattttcctcacaacgtggtaactgggctctggtgtaagggtgatgtctggcgcatgatgtcgagcgtgcgcgcaaccttgtcataatggagttgcttcctgacattctcgtattttgtatagcaaaacgcggccctggcagaacacactcttcttcgccttctatcctgccgcttagcgtgttccgtgtgatagttcaagtacaaccacactcttaagttggtcaaaagaatgctggcttcagttgtaatcaaaactccatcgcatctaatcgttctgaggaaatcatccaagcaatgcaactggattgtgtttcaagcaggagaggagagggaagagacggaagaaccatgttaatttttattccaaacgatctcgcagtacttcaaattgtagatcgcgcagatggcatctctcgcccccactgtgttggtgaaaaagcacagctagatcaaaagaaatgcgattttcaaggtgctcaacggtggcttccagcaaagcctccacgcgcacatccaagaacaaaagaataccaaaagaaggagcattttctaactcctcaatcatcatattacattcctgcaccattcccagataattttcagctttccagccttgaattattcgtgtcagttcttgtggtaaatccaatccacacattacaaacaggtcccggagggcgccctccaccaccattcttaaacacaccctcataatgacaaaatatcttgctcctgtgtcacctgtagcgaattgagaatggcaacatcaattgacatgcccttggctctaagttcttctttaagttctagttgtaaaaactctctcatattatcaccaaactgcttagccagaagccccccgggaacaagagcaggggacgctacagtgcagtacaagcgcagacctccccaattggctccagcaaaaacaagattggaataagcatattgggaaccgccagtaatatcatcgaagttgctggaaatataatcaggcagagtttcttgtaaaaattgaataaaagaaaaatttgccaaaaaaacattcaaaacctctgggatgcaaatgcaataggttaccgcgctgcgctccaacattgttagttttgaattagtctgcaaaaataaaaaaaaaaacaagcgtcatatcatagtagcctgacgaacagatggataaatcagtctttccatcacaagacaagccacagggtctccagctcgaccctcgtaaaacctgtcatcatgattaaacaacagcaccgaaagttcctcgcggtgaccagcatgaataattcttgatgaagcatacaatccagacatgttagcatcagttaacgagaaaaaacagccaacatagcctttgggtataattatgcttaatcgtaagtatagcaaagccacccctcgcggatacaaagtaaaaggcacaggagaataaaaaatataattatttctctgctgctgttcaggcaacgtcgcccccggtccctctaaatacacatacaaagcctcatcagccatggcttaccagacaaagtacagcgggcacacaaagcacaagctctaaagtgactctccaacctctccacaatatatatatacacaagccctaaactgacgtaatgggagtaaagtgtaaaaaatcccgccaaacccaacacacaccccgaaactgcgtcaccagggaaaagtacagtttcacttccgcaatcccaacaggcgtaacttcctctttctcacggtacgtgatatcccactaacttgcaacgtcattttcccacggtcgcaccgccccttttagccgttaaccccacagccaatcaccacacgatccacactttttaaaatcacctcatttacatattggcaccattccatctataaggtatattatatagataga

SEQ ID NO: 97 - DNA, 36253 bp, Artificial Sequence
  Genome sequence of NG-754 virus
tctatctatataatataccttatagatggaatggtgccaatatgtaaatgaggtgattttaaaaagtgtggatcgtgtggtgattggctgtggggttaacggctaaaaggggcggtgcgaccgtgggaaaatgacgttttgtgggggtggagtttttttgcaagttgtcgcgggaaatgtgacgcataaaaaggcttttttctcacggaactacttagttttcccacggtatttaacaggaaatgaggtagttttgaccggatgcaagtgaaaattgttgattttcgcgcgaaaactgaatgaggaagtgtttttctgaataatgtggtatttatggcagggtggagtatttgttcagggccaggtagactttgacccattacgtggaggtttcgattaccgtgttttttacctgaatttccgcgtaccgtgtcaaagtcttctgtttttacgtaggtgtcagctgatcgctagggtatttatacctcagggtttgtgtcaagaggccactcttgagtgccagcgagaagagttttctcctctgcgccggcagtttaataataaaaaaatgagagatttgcgatttctgcctcaggaaataatctctgctgagactggaaatgaaatattggagcttgtggtgcacgccctgatgggagacgatccggagccacctgtgcagctttttgagcctcctacgcttcaggaactgtatgatttagaggtagagggatcggaggattctaatgaggaagctgtaaatggcttttttaccgattctatgcttttagctgctaatgaagggttagaattagatccgcctttggacacttttgatactccaggggtaattgtggaaagcggtacaggtgtaagaaaattacctgatttgagttccgtggactgtgatttgcactgctatgaagacgggtttcctccgagtgatgaggaggaccatgaaaaggagcagtccatgcagactgcagcgggtgagggagtgaaggctgccaatgttggttttcagttggattgcccggagcttcctggacatggctgtaagtcttgtgaatttcacaggaaaaatactggagtaaaggaactgttatgttcgctttgttatatgagaacgcactgccactttatttacagtaagtgtgtttaagttaaaatttaaaggaatatgctgtttttcacatgtatattgagtgtgagttttgtgcttcttattataggtcctgtgtctgatgctgatgaatcaccatctcctgattctactacctcacctcctgagattcaagcacctgttcctgtggacgtgcgcaagcccattcctgtgaagcttaagcctgggaaacgtccagcagtggaaaaacttgaggacttgttacagggtggggacggacctttggacttgagtacacggaaacgtccaagacaataagtgttccatatccgtgtttacttaaggtgacgtcaatatttgtgtgacagtgcaatgtaataaaaatatgttaactgttcactggtttttattgctttttgggcggggactcaggtatataagtagaagcagacctgtgtggttagctcataggagctggctttcatccatggaggtttgggccattttggaagaccttaggaagactaggcaactgttagagaacgcttcggacggagtctccggtttttggagattctggttcgctagtgaattagctagggtagtttttaggataaaacaggactataaacaagaatttgaaaagttgttggtagattgcccaggactttttgaagctcttaatttgggccatcaggttcactttaaagaaaaagttttatcagttttagacttttcaaccccaggtagaactgctgctgctgtggcttttcttacttttatattagataaatggatcccgcagactcatttcagcaggggatacgttttggatttcatagccacagcattgtggagaacatggaaggttcgcaagatgaggacaatcttaggttactggccagtgcagcctttgggtgtagcgggaatcctgaggcatccaccggtcatgccagcggttctggaggaggaacagcaagaggacaacccgagagccggcctggaccctccagtggaggaggcggagtagctgacttgtctcctgaactgcaacgggtgcttactggatctacgtccactggacgggataggggcgttaagagggagagggcatctagtggtactgatgctagatctgagttggctttaagtttaatgagtcgcagacgtcctgaaaccatttggtggcatgaggttcagaaagagggaagggatgaagtttctgtattgcaggagaaatattcactggaacaggtgaaaacatgttggttggagcctgaggatgattgggaggtggccattaaaaattatgccaagatagctttgaggcctgataaacagtataagattactagacggattaatatccggaatgcttgttacatatctggaaatggggctgaggtggtaatagatactcaagacaaggcagttattagatgctgcatgatggatatgtggcctggggtagtcggtatggaagcagtaacttttgtaaatgttaagtttaggggagatggttataatggaatagtgtttatggccaataccaaacttatattgcatggttgtagcttttttggtttcaacaatacctgtgtagatgcctggggacaggttagtgtacggggatgtagtttctatgcgtgttggattgccacagctggcagaaccaagagtcaattgtctctgaagaaatgcatatttcaaagatgtaacctgggcattctgaatgaaggcgaagcaagggtccgccactgcgcttctacagatactggatgttttattttgattaagggaaatgccagcgtaaagcataacatgatttgcggtgcttccgatgagaggccttatcaaatgctcacttgtgctggtgggcattgtaatatgctggctactgtgcatattgtttcccatcaacgcaaaaaatggcctgtttttgatcacaatgtgatgacgaagtgtaccatgcatgcaggtgggcgtagaggaatgtttatgccttaccagtgtaacatgaatcatgtgaaagtgttgttggaaccagatgccttttccagaatgagcctaacaggaatttttgacatgaacatgcaaatctggaagatcctgaggtatgatgatacgagatcgagggtacgcgcatgcgaatgcggaggcaagcatgccaggttccagccggtgtgtgtagatgtgactgaagatctcagaccggatcatttggttattgcccgcactggagcagagttcggatccagtggagaagaaactgactaaggtgagtattgggaaaactttggggtgggattttcagatggacagattgagtaaaaatttgttttttctgtcttgcagctgtcatgagtggaaacgcttcttttaaggggggagtcttcagcccttatctgacagggcgtctcccatcctgggcaggagttcgtcagaatgttatgggatctactgtggatggaagacccgtccaacccgccaattcttcaacgctgacctatgctactttaagttcttcacctttggacgcagctgcagctgccgccgccgcttctgttgccgctaacactgtgcttggaatgggttactatggaagcatcatggctaattccacttcctctaataacccttctaccctgactcaggacaagttacttgtccttttggcccagctggaggctttgacccaacgtctgggtgaactttctcagcaggtggtcgagttgcgagtacaaactgagtctgctgtcggcacggcaaagtctaaataaaaaaatcccagaatcaatgaataaataaacaagcttgttgttgatttaaaatcaagtgtttttatttcatttttcgcgcacggtatgccctagaccaccgatctctatcattgagaactcggtggattttttccaggatcctatagaggtgggattgaatgtttagatacatgggcattaggccgtctttggggtggagatagctccattgaagggattcatgctccggggtagtgttgtaaatcacccagtcataacaaggtcgcagtgcatggtgttgcacaatatcttttagaagtaggctgattgccacagataagcccttggtgtaggtgtttacaaaccggttgagctgggatgggtgcattcggggtgaaattatgtgcattttggattggatttttaagttggcaatattgccgccaagatcccgtcttgggttcatgttatgaaggaccaccaagacggtgtatccggtacatttaggaaatttatcgtgcagcttggatggaaaagcgtggaaaaatttggagacacccttgtgtcctccaagattttccatgcactcatccatgataatagcaatggggccgtgggcagcggcgcgggcaaacacgttccgtgggtctgacacatcatagttatgttcctgagttaaatcatcataagccattttaatgaatttggggcggagagtaccagattggggtatgaatgttccttcgggccccggagcatagttcccctcacagatttgcatttcccaagctttcagttccgagggtggaatcatgtccacctggggggctatgaaaaacaccgtttctggggcgggggtgattaattgtgatgatagcaaatttctgagcaattgagatttgccacatccggtggggccataaatgattccgattacgggttgcaggtggtagtttagggaacggcaactgccgtcttctcgaagcaagggggccacctcgttcatcatttcccttacatgcatattttcccgcaccaaatccattaggaggcgctctcctcctagtgatagaagttcttgtagtgaggaaaagtttttcagcggtttcagaccgtcagccatgggcattttggagagagtttgctgcaaaagttctagtctgttccacagttcagtgatgtgttctatggcatctcgatccagcagacctcctcgtttcgcgggtttggacggctcctggaatagggtatgagacgatgggcgtccagcgctgccagggttcggtccttccagggtctcagtgttcgagtcagggttgtttccgtcacagtgaaggggtgtgcgcctgcttgggcgcttgccagggtgcgcttcagactcatcctgctggtcgaaaacttctgtcgcttggcgccctgtatgtcggccaagtagcagtttaccatgagttcgtagttgagcgcctcggctgcgtggcctttggcgcggagcttacctttggaagttttcttgcataccgggcagtataggcatttcagcgcatacaacttgggcgcaaggaaaacggattctggggagtatgcatctgcgccgcaggaggcgcaaacagtttcacattccaccagccaggttaaatccggttcattggggtcaaaaacaagttttccgccatattttttgatgcgtttcttacctttggtctccatgagttcgtgtcctcgttgagtgacaaacaggctgtccgtgtccccgtagactgattttacaggcctcttctccagtggagtgcctcggtcttcttcgtacaggaactctgaccactctgatacaaaggcgcgcgtccaggccagcacaaaggaggctatgtgggaggggtagcgatcgttgtcaaccagggggtccaccttttccaaagtatgcaaacacatgtcaccctcttcaacatccaggaatgtgattggcttgtaggtgtatttcacgtgacctggggtccccgctgggggggtataaaagggggcggttctttgctcttcctcactgtcttccggatcgctgtccaggaacgtcagctgttggggtaggtattccctctcgaaggcgggcatgacctctgcactcaggttgtcagtttctaagaacgaggaggatttgatattgacagtgccggttgagatgcctttcatgaggttttcgtccatctggtcagaaaacacaatttttttattgtcaagtttggtggcaaatgatccatacagggcgttggataaaagtttggcaatggatcgcatggtttggttcttttccttgtccgcgcgctctttggcggcgatgttgagttggacatactcgcgtgccaggcacttccattcggggaagatagttgttaattcatctggcacgattctcacttgccaccctcgattatgcaaggtaattaaatccacactggtggccacctcgcctcgaaggggttcattggtccaacagagcctacctcctttcctagaacagaaagggggaagtgggtctagcataagttcatcgggagggtctgcatccatggtaaagattcccggaagtaaatccttatcaaaatagctgatgggagtggggtcatctaaggccatttgccattctcgagctgccagtgcgcgctcatatgggttaaggggactgccccatggcatgggatgggtgagtgcagaggcatacatgccacagatgtcatagacgtagatgggatcctcaaagatgcctatgtaggttggatagcatcgcccccctctgatacttgctcgcacatagtcatatagttcatgtgatggcgctagcagccccggacccaagttggtgcgattgggtttttctgttctgtagacgatctggcgaaagatggcgtgagaattggaagagatggtgggtctttgaaaaatgttgaaatgggcatgaggtagacctacagagtctctgacaaagtgggcataagattcttgaagcttggttaccagttcggcggtgacaagtacgtctagggcgcagtagtcaagtgtttcttgaatgatgtcataacctggttggtttttcttttcccacagttcgcggttgagaaggtattcttcgcgatccttccagtactcttctagcggaaacccgtctttgtctgcacggtaagatcctagcatgtagaactgattaactgccttgtaagggcagcagcccttctctacgggtagagagtatgcttgagcagcttttcgtagcgaagcgtgagtaagggcaaaggtgtctctgaccatgactttgaggaattggtatttgaagtcgatgtcgtcacaggctccctgttcccagagttggaagtctacccgtttcttgtaggcggggttgggcaaagcgaaagtaacatcattgaagagaatcttgccggccctgggcatgaaattgcgagtgatgcgaaaaggctgtggtacttccgctcggttattgataacctgggcagctaggacgatctcgtcgaaaccgttgatgttgtgtcctacgatgtataattctatgaaacgcggcgtgcctctgacgtgaggtagcttactgagctcatcaaaggttaggtctgtggggtcagataaggcgtagtgttcgagagcccattcgtgcaggtgaggattcgctttaaggaaggaggaccagaggtccactgccagtgctgtttgtaactggtcccggtactgacgaaaatgccgtccgactgccattttttctggggtgacgcaatagaaggtttgggggtcctgccgccagcgatcccacttgagttttatggcgaggtcataggcgatgttgacgagccgctggtctccagagagtttcatgaccagcatgaaggggattagctgcttgccaaaggaccccatccaggtgtaggtttccacatcgtaggtgagaaagagcctttctgtgcgaggatgagagccaatcgggaagaactggatctcctgccaccagttggaggaatggctgttgatgtgatggaagtagaactccctgcgacgcgccgagcattcatgcttgtgcttgtacagacggccgcagtagtcgcagcgttgcacgggttgtatctcgtgaatgagttgtacctggcttcccttgacgagaaatttcagtgggaagccgaggcctggcgattgtatctcgtgctttactatgttgtctgcatcggcctgttcatcttctgtctcgatggtggtcatgctgacgagccctcgcgggaggcaagtccagacctcggcgcggcaggggcggagctcgaggacgagagcgcgcaggctggagctgtccagggtcctgagacgctgcggactcaggttagtaggcagtgtcaggagattaacttgcatgatcttttggagggcgtgcgggaggttcagatagtacttgatctcaacgggtccgttggtggagatgtcgatggcttgcagggttccgtgtcccttgggcgctaccaccgtgcccttgtttttcattttggacggcggtggctctgttgcttcttgcatgtttagaagcggtgtcgagggcgcgcaccgggcggcaggggcggctcgggacccggcggcatggctggcagtggtacgtcggcgccgcgcgcgggtaggttctggtactgcgccctgagaagactcgcatgcgcgacgacgcggcggttgacatcctggatctgacgcctctgggtgaaagctaccggccccgtgagcttgaacctgaaagagagttcaacagaatcaatctcggtatcgttgacggcggcttgcctaaggatttcttgcacgtcaccagagttgtcctggtaggcgatctccgccatgaactgctcgatctcttcctcttgaagatctccgcggcccgctctctcgacggtggccgcgaggtcgttggagatgcgcccaatgagttgagagaatgcattcatgcccgcctcgttccagacgcggctgtagaccacggcccccacgggatctctcgcgcgcatgaccacctgggcgaggttgagctccacgtggcgggtgaagaccgcatagttgcataggcgctggaaaaggtagttgagtgtggtggcgatgtgctcggtgacgaagaaatacatgatccatcgtctcagcggcatctcgctgacatcgcccagagcttccaagcgctccatggcctcgtagaagtccacggcaaaattaaaaaactgggagtttcgcgcggacacggtcaactcctcttccagaagacggataagttcggcgatggtggtgcgcacctcgcgctcgaaagcccctgggatttcttcctcaatctcttcttcttccactaacatctcttcctcttcaggtggggctgcaggaggagggggaacgcggcgacgccggcggcgcacgggcagacggtcgatgaatctttcaatgacctctccgcggcggcggcgcatggtttcagtgacggcgcggccgttctcgcgcggtcgcagagtaaaaacaccgccgcgcatctccttaaagtggtgactgggaggttctccgtttgggagggagagggcgctgattatacattttattaattggcccgtagggactgcacgcagagatctgatcgtgtcaagatccacgggatctgaaaacctttcgacgaaagcgtctaaccagtcacagtcacaaggtaggctgagtacggcttcttgtgggcgggggtggttatgtgttcggtctgggtcttctgtttcttcttcatctcgggaaggtgagacgatgctgctggtgatgaaattaaagtaggcagttctaagacggcggatggtggcgaggagcaccaggtctttgggtccggcttgctggatacgcaggcgattggccattccccaagcattatcctgacatctagcaagatctttgtagtagtcttgcatgagccgttctacgggcacttcttcctcacccgttctgccatgcatacgtgtgagtccaaatccgcgcattggttgtaccagtgccaagtcagctacgactctttcggcgaggatggcttgctgtacttgggtaagggtggcttgaaagtcatcaaaatccacaaagcggtggtaagctcctgtattaatggtgtaagcacagttggccatgactgaccagttaactgtctggtgaccagggcgcacgagctcggtgtatttaaggcgcgaataggcgcgggtgtcaaagatgtaatcgttgcaggtgcgcaccagatactggtaccctataagaaaatgcggcggtggttggcggtagagaggccatcgttctgtagctggagcgccaggggcgaggtcttccaacataaggcggtgatagccgtagatgtacctggacatccaggtgattcctgcggcggtagtagaagcccgaggaaactcgcgtacgcggttccaaatgttgcgtagcggcatgaagtagttcattgtaggcacggtttgaccagtgaggcgcgcgcagtcattgatgctctatagacacggagaaaatgaaagcgttcagcgactcgactccgtagcctggaggaacgtgaacgggttgggtcgcggtgtaccccggttcgagacttgtactcgagccggccggagccgcggctaacgtggtattggcactcccgtctcgacccagcctacaaaaatccaggatacggaatcgagtcgttttgctggtttccgaatggcagggaagtgagtcctattttttttttttgccgctcagatgcatcccgtgctgcgacagatgcgcccccaacaacagcccccctcgcagcagcagcagcagcaatcacaaaaggctgtccctgcaactactgcaactgccgccgtgagcggtgcgggacagcccgcctatgatctggacttggaagagggcgaaggactggcacgtctaggtgcgccttcacccgagcggcatccgcgagttcaactgaaaaaagattctcgcgaggcgtatgtgccccaacagaacctatttagagacagaagcggcgaggagccggaggagatgcgagcttcccgctttaacgcgggtcgtgagctgcgtcacggtttggaccgaagacgagtgttgcgggacgaggatttcgaagttgatgaaatgacagggatcagtcctgccagggcacacgtggctgcagccaaccttgtatcggcttacgagcagacagtaaaggaagagcgtaacttccaaaagtcttttaataatcatgtgcgaaccctgattgcccgcgaagaagttacccttggtttgatgcatttgtgggatttgatggaagctatcattcagaaccctactagcaaacctctgaccgcccagctgtttctggtggtgcaacacagcagagacaatgaggctttcagagaggcgctgctgaacatcaccgaacccgaggggagatggttgtatgatcttatcaacattctacagagtatcatagtgcaggagcggagcctgggcctggccgagaaggtggctgccatcaattactcggttttgagcttgggaaaatattacgctcgcaaaatctacaagactccatacgttcccatagacaaggaggtgaagatagatgggttctacatgcgcatgacgctcaaggtcttgaccctgagcgatgatcttggggtgtatcgcaatgacagaatgcatcgcgcggttagcgccagcaggaggcgcgagttaagcgacagggaactgatgcacagtttgcaaagagctctgactggagctggaaccgagggtgagaattacttcgacatgggagctgacttgcagtggcagcctagtcgcagggctctgagcgccgcgacggcaggatgtgagcttccttacatagaagaggcggatgaaggcgaggaggaagagggcgagtacttggaagactgatggcacaacccgtgttttttgctagatggaacagcaagcaccggatcccgcaatgcgggcggcgctgcagagccagccgtccggcattaactcctcggacgattggacccaggccatgcaacgtatcatggcgttgacgactcgcaaccccgaagcctttagacagcaaccccaggccaaccgtctatcggccatcatggaagctgtagtgccttcccgctctaatcccactcatgagaaggtcctggccatcgtgaacgcgttggtggagaacaaagctattcgtccagatgaggccggactggtatacaacgctctcttagaacgcgtggctcgctacaacagtagcaatgtgcaaaccaatttggaccgtatgataacagatgtacgcgaagccgtgtctcagcgcgaaaggttccagcgtgatgccaacctgggttcgctggtggcgttaaatgctttcttgagtactcagcctgctaatgtgccgcgtggtcaacaggattatactaactttttaagtgctttgagactgatggtatcagaagtacctcagagcgaagtgtatcagtccggtcctgattacttctttcagactagcagacagggcttgcagacggtaaatctgagccaagcttttaaaaaccttaaaggtttgtggggagtgcatgccccggtaggagaaagagcaaccgtgtctagcttgttaactccgaactcccgcctattattactgttggtagctcctttcaccgacagcggtagcatcgaccgtaattcctatttgggttacctactaaacctgtatcgcgaagccatagggcaaagtcaggtggacgagcagacctatcaagaaattacccaagtcagtcgcgctttgggacaggaagacactggcagtttggaagccactctgaacttcttgcttaccaatcggtctcaaaagatccctcctcaatatgctcttactgcggaggaggagaggatccttagatatgtgcagcagagcgtgggattgtttctgatgcaagagggggcaactccgactgcagcactggacatgacagcgcgaaatatggagcccagcatgtatgccagtaaccgacctttcattaacaaactgctggactacttgcacagagctgccgctatgaactctgattatttcaccaatgccatcttaaacccgcactggctgcccccacctggtttctacacgggcgaatatgacatgcccgaccctaatgacggatttctgtgggacgacgtggacagcgatgttttttcacctctttctgatcatcgcacgtggaaaaaggaaggcggcgatagaatgcattcttctgcatcgctgtccggggtcatgggtgctaccgcggctgagcccgagtctgcaagtccttttcctagtctacccttttctctacacagtgtacgtagcagcgaagtgggtagaataagtcgcccgagtttaatgggcgaagaggagtatctaaacgattccttgctcagaccggcaagagaaaaaaatttcccaaacaatggaatagaaagtttggtggataaaatgagtagatggaagacttatgctcaggatcacagagacgagcctgggatcatggggattacaagtagagcgagccgtagacgccagcgccatgacagacagaggggtcttgtgtgggacgatgaggattcggccgatgatagcagcgtgctggacttgggtgggagaggaaggggcaacccgtttgctcatttgcgccctcgcttgggtggtatgttgtaaaaaaaaataaaaaaaaaactcaccaaggccatggcgacgagcgtacgttcgttcttctttattatctgtgtctagtataatgaggcgagtcgtgctaggcggagcggtggtgtatccggagggtcctcctccttcgtacgagagcgtgatgcagcagcagcaggcgacggcggtgatgcaatccccactggaggctccctttgtgcctccgcgatacctggcacctacggagggcagaaacagcattcgttattcggaactggcacctcagtacgataccaccaggttgtatctggtggacaacaagtcggcggacattgcttctctgaactatcagaatgaccacagcaacttcttgaccacggtggtgcaaaacaatgactttacccctacggaagccagcacccagaccattaactttgatgaacgatcgcggtggggcggtcagctaaagaccatcatgcatactaacatgccaaacgtgaacgagtatatgtttagtaacaagttcaaagcgcgtgtgatggtgtccagaaaacctcccgacggtgctgcagttggggatacttatgatcacaagcaggatattttgaaatatgagtggttcgagtttactttgccagaaggcaacttttcagttactatgactattgatttgatgaacaatgccatcatagataattacttgaaagtgggtagacagaatggagtgcttgaaagtgacattggtgttaagttcgacaccaggaacttcaagctgggatgggatcccgaaaccaagttgatcatgcctggagtgtatacgtatgaagccttccatcctgacattgtcttactgcctggctgcggagtggattttaccgagagtcgtttgagcaaccttcttggtatcagaaaaaaacagccatttcaagagggttttaagattttgtatgaagatttagaaggtggtaatattccggccctcttggatgtagatgcctatgagaacagtaagaaagaacaaaaagccaaaatagaagctgctacagctgctgcagaagctaaggcaaacatagttgccagcgactctacaagggttgctaacgctggagaggtcagaggagacaattttgcgccaacacctgttccgactgcagaatcattattggccgatgtgtctgaaggaacggacgtgaaactcactattcaacctgtagaaaaagatagtaagaatagaagctataatgtgttggaagacaaaatcaacacagcctatcgcagttggtatctttcgtacaattatggcgatcccgaaaaaggagtgcgttcctggacattgctcaccacctcagatgtcacctgcggagcagagcaggtctactggtcgcttccagacatgatgaaggatcctgtcactttccgctccactagacaagtcagtaactaccctgtggtgggtgcagagcttatgcccgtcttctcaaagagcttctacaacgaacaagctgtgtactcccagcagctccgccagtccacctcgcttacgcacgtcttcaaccgctttcctgagaaccagattttaatccgtccgccggcgcccaccattaccaccgtcagtgaaaacgttcctgctctcacagatcacgggaccctgccgttgcgcagcagtatccggggagtccaacgtgtgaccgttactgacgccagacgccgcacctgtccctacgtgtacaaggcactgggcatagtcgcaccgcgcgtcctttcaagccgcactttctaaaaaaaaaaaaaatgtccattcttatctcgcccagtaataacaccggttggggtctgcgcgctccaagcaagatgtacggaggcgcacgcaaacgttctacccaacatcctgtccgtgttcgcggacattttcgcgctccatggggcgccctcaagggccgcactcgcgttcgaaccaccgtcgatgatgtaatcgatcaggtggttgccgacgcccgtaattatactcctactgcgcctacatctactgtggatgcagttattgacagtgtagtggctgacgctcgcaactatgctcgacgtaagagccggcgaaggcgcattgccagacgccaccgagctaccactgccatgcgagccgcaagagctctgctacgaagagctagacgcgtggggcgaagagccatgcttagggcggccagacgtgcagcttcgggcgccagcgccggcaggtcccgcaggcaagcagccgctgtcgcagcggcgactattgccgacatggcccaatcgcgaagaggcaatgtatactgggtgcgtgacgctgccaccggtcaacgtgtacccgtgcgcacccgtccccctcgcacttagaagatactgagcagtctccgatgttgtgtcccagcggcgaggatgtccaagcgcaaatacaaggaagaaatgctgcaggttatcgcacctgaagtctacggccaaccgttgaaggatgaaaaaaaaccccgcaaaatcaagcgggttaaaaaggacaaaaaagaagaggaagatggcgatgatgggctggcggagtttgtgcgcgagtttgccccacggcgacgcgtgcaatggcgtgggcgcaaagttcgacatgtgttgagacctggaacttcggtggtctttacacccggcgagcgttcaagcgctacttttaagcgttcctatgatgaggtgtacggggatgatgatattcttgagcaggcggctgaccgattaggcgagtttgcttatggcaagcgtagtagaataacttccaaggatgagacagtgtcgatacccttggatcatggaaatcccacccctagtcttaaaccggtcactttgcagcaagtgttacccgtaactccgcgaacaggtgttaaacgcgaaggtgaagatttgtatcccactatgcaactgatggtacccaaacgccagaagttggaggacgttttggagaaagtaaaagtggatccagatattcaacctgaggttaaagtgagacccattaagcaggtagcgcctggtctgggggtacaaactgtagacattaagattcccactgaaagtatggaagtgcaaactgaacccgcaaagcctactgccacctccactgaagtgcaaacggatccatggatgcccatgcctattacaactgacgccgccggtcccactcgaagatcccgacgaaagtacggtccagcaagtctgttgatgcccaattatgttgtacacccatctattattcctactcctggttaccgaggcactcgctactatcgcagccgaaacagtacctcccgccgtcgccgcaagacacctgcaaatcgcagtcgtcgccgtagacgcacaagcaaaccgactcccggcgccctggtgcggcaagtgtaccgcaatggtagtgcggaacctttgacactgccgcgtgcgcgttaccatccgagtatcatcacttaatcaatgttgccgctgcctccttgcagatatggccctcacttgtcgccttcgcgttcccatcactggttaccgaggaagaaactcgcgccgtagaagagggatgttgggacgcggaatgcgacgctacaggcgacggcgtgctatccgcaagcaattgcggggtggttttttaccagccttaattccaattatcgctgctgcaattggcgcgataccaggcatagcttccgtggcggttcaggcctcgcaacgacattgacattggaaaaaaacgtataaataaaaaaaaaaaaatacaatggactctgacactcctggtcctgtgactatgttttcttagagatggaagacatcaatttttcatccttggctccgcgacacggcacgaagccgtacatgggcacctggagcgacatcggcacgagccaactgaacgggggcgccttcaattggagcagtatctggagcgggcttaaaaattttggctcaaccataaaaacatacgggaacaaagcttggaacagcagtacaggacaggcgcttagaaataaacttaaagaccagaacttccaacaaaaagtagtcgatgggatagcttccggcatcaatggagtggtagatttggctaaccaggctgtgcagaaaaagataaacagtcgtttggacccgccgccagcaaccccaggtgaaatgcaagtggaggaagaaattcctccgccagaaaaacgaggcgacaagcgtccgcgtcccgatttggaagagacgctggtgacgcgcgtagatgaaccgccttcttatgaggaagcaacgaagcttggaatgcccaccactagaccgatagccccaatggccaccggggtgatgaaaccttctcagttgcatcgacccgtcaccttggatttgccccctccccctgctgctactgctgtacccgcttctaagcctgtcgctgccccgaaaccagtcgccgtagccaggtcacgtcccgggggcgctcctcgtccaaatgcgcactggcaaaatactctgaacagcatcgtgggtctaggcgtgcaaagtgtaaaacgccgtcgctgcttttaattaaatatggagtagcgcttaacttgcctatctgtgtatatgtgtcattacacgccgtcacagcagcagaggaaaaaaggaagaggtcgtgcgtcgacgctgagttactttcaagatggccaccccatcgatgctgccccaatgggcatacatgcacatcgccggacaggatgcttcggagtacctgagtccgggtctggtgcagttcgcccgcgccacagacacctacttcaatctgggaaataagtttagaaatcccaccgtagcgccgacccacgatgtgaccaccgaccgtagccagcggctcatgttgcgcttcgtgcccgttgaccgggaggacaatacatactcttacaaagtgcggtacaccctggccgtgggcgacaacagagtgctggatatggccagcacgttctttgacattaggggtgtgttggacagaggtcccagtttcaaaccctattctggtacggcttacaactccctggctcctaaaggcgctccaaatacatctcagtggattgcagaaggtgtaaaaaatacaactggtgaggaacacgtaacagaagaggaaaccaatactactacttacacttttggcaatgctcctgtaaaagctgaagctgaaattacaaaagaaggactcccagtaggtttggaagtttcagatgaagaaagtaaaccgatttatgctgataaaacatatcagccagaacctcagctgggagatgaaacttggactgaccttgatggaaaaaccgaaaagtatggaggcagggctctcaaacccgatactaagatgaaaccatgctacgggtcctttgccaaacctactaatgtgaaaggcggtcaggcaaaacaaaaaacaacggagcagccaaatcagaaagtcgaatatgatatcgacatggagttttttgatgcggcatcgcagaaaacaaacttaagtcctaaaattgtcatgtatgcagaaaatgtaaatttggaaactccagacactcatgtagtgtacaaacctggaacagaagacacaagttccgaagctaatttgggacaacaatctatgcccaacagacccaactacattggcttcagagataactttattggacttatgtactataacagtactggtaacatgggggtgctggctggtcaagcgtctcagttaaatgcagtggttgacttgcaggacagaaacacagaactttcttaccaactcttgcttgactctctgggcgacagaaccagatactttagcatgtggaatcaggctgtggacagttatgatcctgatgtacgtgttattgaaaatcatggtgtggaagatgaacttcccaactactgttttccactggacggcataggtgttccaacaaccagttacaaatcaatagttccaaatggagacaatgcgcctaattggaaggaacctgaagtaaatggaacaagtgagatcggacagggtaatttgtttgccatggaaattaaccttcaagccaatctatggcgaagtttcctttattccaatgtggctctatatctcccagactcgtacaaatacaccccgtccaatgtcactcttccagaaaacaaaaacacctacgactacatgaacgggcgggtggtgccgccatctctagtagacacctatgtgaacattggtgccaggtggtctctggatgccatggacaatgtcaacccattcaaccaccaccgtaacgctggcttgcgttaccgatccatgcttctgggtaacggacgttatgtgcctttccacatacaagtgcctcaaaaattcttcgctgttaaaaacctgctgcttctcccaggctcctacacttatgagtggaactttaggaaggatgtgaacatggttctacagagttccctcggtaacgacctgcgggtagatggcgccagcatcagtttcacgagcatcaacctctatgctacttttttccccatggctcacaacaccgcttccacccttgaagccatgctgcggaatgacaccaatgatcagtcattcaacgactacctatctgcagctaacatgctctaccccattcctgccaatgcaaccaatattcccatttccattccttctcgcaactgggcggctttcagaggctggtcatttaccagactgaaaaccaaagaaactccctctttggggtctggatttgacccctactttgtctattctggttctattccctacctggatggtaccttctacctgaaccacacttttaagaaggtttccatcatgtttgactcttcagtgagctggcctggaaatgacaggttactatctcctaacgaatttgaaataaagcgcactgtggatggcgaaggctacaacgtagcccaatgcaacatgaccaaagactggttcttggtacagatgctcgccaactacaacatcggctatcagggcttctacattccagaaggatacaaagatcgcatgtattcatttttcagaaacttccagcccatgagcaggcaggtggttgatgaggtcaattacaaagacttcaaggccgtcgccataccctaccaacacaacaactctggctttgtgggttacatggctccgaccatgcgccaaggtcaaccctatcccgctaactatccctatccactcattggaacaactgccgtaaatagtgttacgcagaaaaagttcttgtgtgacagaaccatgtggcgcataccgttctcgagcaacttcatgtctatgggggcccttacagacttgggacagaatatgctctatgccaactcagctcatgctctggacatgacctttgaggtggatcccatggatgagcccaccctgctttatcttctcttcgaagttttcgacgtggtcagagtgcatcagccacaccgcggcatcatcgaggcagtctacctgcgtacaccgttctcggccggtaacgctaccacgtaagaagcttcttgcttcttgcaaatagcagctgcaaccatggcctgcggatcccaaaacggctccagcgagcaagagctcagagccattgtccaagacctgggttgcggaccctattttttgggaacctacgataagcgcttcccggggttcatggcccccgataagctcgcctgtgccattgtaaatacggccggacgtgagacggggggagagcactggttggctttcggttggaacccacgttctaacacctgctacctttttgatccttttggattctcggatgatcgtctcaaacagatttaccagtttgaatatgagggtctcctgcgccgcagcgctcttgctaccaaggaccgctgtattacgctggaaaaatctacccagaccgtgcagggtccccgttctgccgcctgcggacttttctgctgcatgttccttcacgcctttgtgcactggcctgaccgtcccatggacggaaaccccaccatgaaattgctaactggagtgccaaacaacatgcttcattctcctaaagtccagcccaccctgtgtgacaatcaaaaagcactctaccattttcttaatacccattcgccttattttcgctcccatcgtacacacatcgaaagggccactgcgttcgaccgtatggatgttcaataatgactcatgtaaacaacgtgttcaataaacatcactttatttttttacatgtatcaaggctctgcattacttatttatttacaagtcgaatgggttctgacgagaatcagaatgacccgcaggcagtgatacgttgcggaactgatacttgggttgccacttgaattcgggaatcaccaacttgggaaccggtatatcgggcaggatgtcactccacagctttctggtcagctgcaaagctccaagcaggtcaggagccgaaatcttgaaatcacaattaggaccagtgctttgagcgcgagagttgcggtacaccggattgcagcactgaaacaccatcagcgacggatgtctcacgcttgccagcacggtgggatctgcaatcatgcccacatccagatcttcagcattggcaatgctgaacggggtcatcttgcaggtctgcctacccatggcgggcacccaattaggcttgtggttgcaatcgcagtgcagggggatcagtatcatcttggcctgatcctgtctgattcctggatacacggctctcatgaaagcatcatattgcttgaaagcctgctgggctttactaccctcggtataaaacatcccgcaggacctgctcgaaaactggttagctgcacagccggcatcattcacacagcagcgggcgtcattgttagctatttgcaccacacttctgccccagcggttttgggtgattttggttcgctcgggattctcctttaaggctcgttgtccgttctcgctggccacatccatctcgataatctgctccttctgaatcataatattgccatgcaggcacttcagcttgccctcataatcattgcagccatgaggccacaacgcacagcctgtacattcccaattatggtgggcgatctgagaaaaagaatgtatcattccctgcagaaatcttcccatcatcgtgctcagtgtcttgtgactagtgaaagttaactggatgcctcggtgctcctcgtttacgtactggtgacagatgcgcttgtattgttcgtgttgctcaggcattagtttaaaagaggttctaagttcgttatccagcctgtacttctccatcagcagacacatcacttccatgcctttctcccaagcagacaccaggggcaagctaatcggattcttaacagtgcaggcagcagctcctttagccagagggtcatctttagcgatcttctcaatgcttcttttgccatccttctcaacgatgcgcacgggcgggtagctgaaacccactgctacaagttgcgcctcttctctttcttcttcgctgtcttgactgatgtcttgcatggggatatgtttggtcttccttggcttctttttggggggtatcggaggaggaggactgtcgctccgttccggagacagggaggattgtgacgtttcgctcaccattaccaactgactgtcggtagaagaacctgaccccacacggcgacaggtgtttctcttcgggggcagaggtggaggcgattgcgaagggctgcggtccgacctggaaggcggatgactggcagaaccccttccgcgttcgggggtgtgctccctgtggcggtcgcttaactgatttccttcgcggctggccattgtgttctcctaggcagagaaacaacagacatggaaactcagccattgctgtcaacatcgccacgagtgccatcacatctcgtcctcagcgacgaggaaaaggagcagagcttaagcattccaccgcccagtcctgccaccacctctaccctagaagataaggaggtcgacgcatctcatgacatgcagaataaaaaagcgaaagagtctgagacagacatcgagcaagacccgggctatgtgacaccggtggaacacgaggaagagttgaaacgctttctagagagagaggatgaaaactgcccaaaacaacgagcagataactatcaccaagatgctggaaatagggatcagaacaccgactacctcatagggcttgacggggaagacgcgctccttaaacatctagcaagacagtcgctcatagtcaaggatgcattattggacagaactgaagtgcccatcagtgtggaagagctcagccgcgcctacgagcttaacctcttttcacctcgtactccccccaaacgtcagccaaacggcacctgcgagccaaatcctcgcttaaacttttatccagcttttgctgtgccagaagtactggctacctatcacatcttttttaaaaatcaaaaaattccagtctcctgccgcgctaatcgcacccgcgccgatgccctactcaatctgggacctggttcacgcttacctgatatagcttccttggaagaggttccaaagatcttcgagggtctgggcaataatgagactcgggccgcaaatgctctgcaaaagggagaaaatggcatggatgagcatcacagcgttctggtggaattggaaggcgataatgccagactcgcagtactcaagcgaagcatcgaggtcacacacttcgcatatcccgctgtcaacctgccccctaaagtcatgacggcggtcatggaccagttactcattaagcgcgcaagtcccctttcagaagacatgcatgacccagatgcctgtgatgagggtaaaccagtggtcagtgatgagcagctaacccgatggctgggcaccgactctcccagggatttggaagagcgtcgcaagcttatgatggccgtggtgctggttaccgtagaactagagtgtctccgacgtttctttaccgattcagaaaccttgcgcaaactcgaagagaatctgcactacacttttagacacggctttgtgcggcaggcatgcaagatatctaacgtggaactcaccaacctggtttcctacatgggtattctgcatgagaatcgcctaggacaaagcgtgctgcacagcaccctgaagggggaagcccgccgtgattacatccgcgattgtgtctatctgtacctgtgccacacgtggcaaaccggcatgggtgtatggcagcaatgtttagaagaacagaacttgaaagagcttgacaagctcttacagaaatctcttaaggttctgtggacagggttcgacgagcgcaccgtcgcttccgacctggcagacctcatcttcccagagcgtctcagggttactttgcgaaacggattgcctgactttatgagccagagcatgcttaacaattttcgctctttcatcctggaacgctccggtatcctgcccgccacctgctgcgcactgccctccgactttgtgcctctcacctaccgcgagtgccccccgccgctatggagtcactgctacctgttccgtctggccaactatctctcctaccactcggatgtgatcgaggatgtgagcggagacggcttgctggagtgtcactgccgctgcaatctgtgcacgccccaccggtccctagcttgcaacccccagttgatgagcgaaacccagataataggcacctttgaattgcaaggccccagcagccaaggcgatgggtcttctcctgggcaaagtttaaaactgaccccgggactgtggacctccgcctacttgcgcaagtttgctccggaagattaccacccctatgaaatcaagttctatgaggaccaatcacagcctccaaaggccgaactttcggcctgcgtcatcacccagggggcaattctggcccaattgcaagccatccaaaaatcccgccaagaatttctactgaaaaagggtaagggggtctaccttgacccccagaccggcgaggaactcaacacaaggttccctcaggatgtcccaacgacgagaaaacaagaagttgaaggtgcagccgccgcccccagaagatatggaggaagattgggacagtcaggcagaggaggcggaggaggacagtctggaggacagtctggaggaagacagtttggaggaggaaaacgaggaggcagaggaggtggaagaagtaaccgccgacaaacagttatcctcggctgcggagacaagcaacagcgctaccatctccgctccgagtcgaggaacccggcggcgtcccagcagtagatgggacgagaccggacgcttcccgaacccaaccagcgcttccaagaccggtaagaaggatcggcagggatacaagtcctggcgggggcataagaatgccatcatctcctgcttgcatgagtgcgggggcaacatatccttcacgcggcgctacttgctattccaccatggggtgaactttccgcgcaatgttttgcattactaccgtcacctccacagcccctactatagccagcaaatcccggcagtctcgacagataaagacagcggcggcgacctccaacagaaaaccagcagcggcagttagaaaatacacaacaagtgcagcaacaggaggattaaagattacagccaacgagccagcgcaaacccgagagttaagaaatcggatctttccaaccctgtatgccatcttccagcagagtcggggtcaagagcaggaactgaaaataaaaaaccgatctctgcgttcgctcaccagaagttgtttgtatcacaagagcgaagatcaacttcagcgcactctcgaggacgccgaggctctcttcaacaagtactgcgcgctgactcttaaagagtaggcagcgaccgcgcttattcaaaaaaggcgggaattacatcatcctcgacatgagtaaagaaattcccacgccttacatgtggagttatcaaccccaaatgggattggcggcaggcgcctcccaggactactccacccgcatgaattggctcagcgccgggccttctatgatttctcgagttaatgatatacgcgcctaccgaaaccaaatacttttggaacagtcagctcttaccaccacgccccgccaacaccttaatcccagaaattggcccgccgccctagtgtaccaggaaagtcccgctcccaccactgtattacttcctcgagacgcccaggccgaagtccaaatgactaatgcaggtgcgcagttagctggcggctccaccctatgtcgtcacaggcctcggcataatataaaacgcctgatgatcagaggccgaggtatccagctcaacgacgagtcggtgagctctccgcttggtctacgaccagacggaatctttcagattgccggctgcgggagatcttccttcacccctcgtcaggctgttctgactttggaaagttcgtcttcgcaaccccgctcgggcggaatcgggaccgttcaatttgtggaggagtttactccctctgtctacttcaaccccttctccggatctcctgggcattacccggacgagttcataccgaacttcgacgcgattagcgagtcagtggacggctacgattgatgtctggtgacgcggctgagctatctcggctgcgacatctagaccactgccgccgctttcgctgctttgcccgggaactcattgagttcatctacttcgaactccccaaggatcaccctcaaggtccggcccacggagtgcggatttctatcgaaggcaaaatagactctcgcctgcaacgaattttctcccagcggcccgtgctgatcgagcgagaccagggaaacaccacggtttccatctactgcatttgtaatcaccccggattgcatgaaagcctttgctgtcttatgtgtactgagtttaataaaaactgaattaagactctcctacggactgccgcttcttcaacccggattttacaaccagaagaacgaaacttttcctgtcgtccaggactctgttaacttcacctttcctactcacaaactagaagctcaacgactacaccgcttttccagaagcattttccctactaatactactttcaaaaccggaggtgagctccaaggtcttcctacagaaaacccttgggtggaagcgggccttgtagtgctaggaattcttgcgggtgggcttgtgattattctttgctacctatacacaccttgcttcactttcttagtggtgttgtggtattggtttaaaaaatggggcccatactagtcttgcttgttttactttcgcttttggaaccgggttctgccaattacgatccatgtctagacttcgacccagaaaactgcacacttacttttgcacccgacacaagccgcatctgtggagttcatcgcctctcttacgaacttggcccccaacgacaaaaatttacctgcatggtgggaatcaaccccatagttatcacccagcaaagtggagatactaagggttgcattcactgctcctgcgattccatcgagtgcacctacaccctgctgaagaccctatgcggcctaagagacctgctaccaatgaattaaaaaatgattaataaaaaatcacttacttgaaatcagcaataaggtctctgttgaaattttctcccagcagcacctcacttccctcttcccaactctggtattctaaaccccgttcagcggcatactttctccatactttaaaggggatgtcaaattttagctcctctcctgtacccacaatcttcatgtctttcttcccagatgaccaagagagtccggctcagtgactccttcaaccctgtctacccctatgaagatgaaagcacctcccaacacccctttataaacccagggtttatttccccaaatggcttcacacaaagcccaaacggagttcttactttaaaatgtttaaccccactaacaaccacaggcggatctctacagctaaaagtgggagggggacttacagtggatgacaccaacggttttttgaaagaaaacataagtgccaccacaccactcgttaagactggtcactctataggtttaccactaggagccggattgggaacgaatgaaaataaactttgtatcaaattaggacaaggacttacattcaattcaaacaacatttgcattgatgacaatattaacaccttatggacaggagtcaaccccaccgaagccaactgtcaaatcatgaactccagtgaatctaatgattgcaaattaattctaacactagttaaaactggagcactagtcactgcatttgtttatgttataggagtatctaacaattttaatatgctaactacacacagaaatataaattttactgcagagctgtttttcgattctactggtaatttactaactagactctcatccctcaaaactccacttaatcataaatcaggacaaaacatggctactggtgccattactaatgctaaaggtttcatgcccagcacgactgcctatcctttcaatgataattctagagaaaaagaaaactacatttacggaacttgttactacacagctagtgatcgcactgcttttcccattgacatatctgtcatgcttaaccgaagagcaataaatgacgagacatcatattgtattcgtataacttggtcctggaacacaggagatgccccagaggtgcaaacctctgctacaaccctagtcacctccccatttaccttttactacatcagagaagacgactgacaaataaagtttgcgatcgccaggcccaccatgaagaaaagtggtgttcttttcctcttgggcatcatcttgctggttctgattggagtgcaaggaaccccagtagtgagaaagggtcgctgttcctgcatcagcaccaaccaagggactatccacctacaatccttgaaagaccttaaacaatttgccccaagcccttcctgcgagaaaattgaaatcattgctacactgaagaatggagttcaaacatgtctaaacccagattcagcagatgtgaaggaactgattaaaaagtgggagaaacaggtcagccaaaagaaaaagcaaaagaatgggaaaaaacatcaaaaaaagaaagttctgaaagttcgaaaatctcaacgttctcgtcaaaagaagactacaggaagcggagagggcagaggaagtctgctaacatgcggtgacgtcgaggagaatcctggacctgctcagtcactggctctgagcctccttatcctggttctggcctttggcatccccaggacccaaggcagtgatggaggggctcaggactgttgcctcaagtacagccaaaggaagattcccgccaaggttgtccgcagctaccggaagcaggaaccaagcttaggctgctccatcccagctatcctgttcttgccccgcaagcgctctcaggcagagctatgtgcagacccaaaggagctctgggtgcagcagctgatgcagcatctggacaagacaccatccccacagaaaccagcccagggctgcaggaaggacaggggggcctccaagactggcaagaaaggaaagggctccaaaggctgcaagaggactgagcggtcacagacccctaaagggccaggaagcggagctactaacttcagcctgctgaagcaggctggagacgtggaggagaaccctggacctgccttgacctttgctttactggtggccctcctggtgctcagctgcaagtcaagctgctctgtgggctgtgatctgcctcaaacccacagcctgggtagcaggaggaccttgatgctcctggcacagatgaggagaatctctcttttctcctgcttgaaggacagacatgactttggatttccccaggaggagtttggcaaccagttccaaaaggctgaaaccatccctgtcctccatgagatgatccagcagatcttcaatctcttcagcacaaaggactcatctgctgcttgggatgagaccctcctagacaaattctacactgaactctaccagcagctgaatgacctggaagcctgtgtgatacagggggtgggggtgacagagactcccctgatgaaggaggactccattctggctgtgaggaaatacttccaaagaatcactctctatctgaaagagaagaaatacagcccttgtgcctgggaggttgtcagagcagaaatcatgagatctttttctttgtcaacaaacttgcaagaaagtttaagaagtaaggaaggaagcggacagtgtactaattatgctctcttgaaattggctggagatgttgagagcaaccctggacctgactggacctggcgcatcctgttcttggtggcagctgctacgggagctcattccaactgggtgaatgtaataagtgatttgaaaaaaattgaagatcttattcaatctatgcatattgatgctactttatatacggaaagtgatgttcaccccagttgcaaagtaacagcaatgaagtgctttctcttggagttacaagttatttcacttgagtccggagatgcaagtattcatgatacagtagaaaatctgatcatcctagcaaacaacagtttgtcttctaatgggaatgtaacagaatctggatgcaaagaatgtgaggaactggaggaaaaaaatattaaagaatttttgcagagttttgtacatattgtccaaatgttcatcaacacttctggaagcggagtgaaacagactttgaattttgaccttctcaagttggcgggagacgtggagtccaaccctggacctatgtgtcaccagcagttggtcatctcttggttttccctggtttttctggcatctcccctcgtggccatatgggaactgaagaaagatgtttatgtcgtagaattggattggtatccggatgcccctggagaaatggtggtcctcacctgtgacacccctgaagaagatggtatcacctggaccttggaccagagcagtgaggtcttaggctctggcaaaaccctgaccatccaagtcaaagagtttggagatgctggccagtacacctgtcacaaaggaggcgaggttctaagccattcgctcctgctgcttcacaaaaaggaagatggaatttggtccactgatattttaaaggaccagaaagaacccaaaaataagacctttctaagatgcgaggccaagaattattctggacgtttcacctgctggtggctgacgacaatcagtactgatttgacattcagtgtcaaaagcagcagaggctcttctgacccccaaggggtgacgtgcggagctgctacactctctgcagagagagtcagaggggacaacaaggagtatgagtactcagtggagtgccaggaggacagtgcctgcccagctgctgaggagagtctgcccattgaggtcatggtggatgccgttcacaagctcaagtatgaaaactacaccagcagcttcttcatcagggacatcatcaaacctgacccacccaagaacttgcagctgaagccattaaagaattctcggcaggtggaggtcagctgggagtaccctgacacctggagtactccacattcctacttctccctgacattctgcgttcaggtccagggcaagagcaagagagaaaagaaagatagagtcttcacggacaagacctcagccacggtcatctgccgcaaaaatgccagcattagcgtgcgggcccaggaccgctactatagctcatcttggagcgaatgggcatctgtgccctgcagtggagggggcggcagcgggggaggcggcagcggcggcgggggatcgagaaacctccccgtggccactccagacccaggaatgttcccatgccttcaccactcccaaaacctgctgagggccgtcagcaacatgctccagaaggccagacaaactctagaattttacccttgcacttctgaagagattgatcatgaagatatcacaaaagataaaaccagcacagtggaggcctgtttaccattggaattaaccaagaatgagagttgcctaaattccagagagacctctttcataactaatgggagttgcctggcctccagaaagacctcttttatgatggccctgtgccttagtagtatttatgaagacttgaagatgtaccaggtggagttcaagaccatgaatgcaaagcttctgatggatcctaagaggcagatctttctagatcaaaacatgctggcagttattgatgagctgatgcaggccctgaatttcaacagtgagactgtgccacaaaaatcctcccttgaagaaccggatttttataaaactaaaatcaagctctgcatacttcttcatgctttcagaattcgggcagtgactattgatagagtgatgagctatctgaatgcttcctaagctagcttgactgactgagatacagcgtaccttcagctcacagacatgataagatacattgatgagtttggacaaaccacaactagaatgcagtgaaaaaaatgctttatttgtgaaatttgtgatgctattgctttatttgtaaccattataagctgcaataaacaagttaacaacaacaattgcattcattttatgtttcaggttcagggggaggtgtgggaggttttttaaagcaagtaaaacctctacaaatgtggtagtcgtcagctatcctgcaggaacttgtttatttgaaaatcaattcacaaaatccgagtagttattttgcctcccccttcccatttaacagaatacaccaatctctccccacgcacagctttaaacatttggataccattagatatagacatggttttagattccacattccaaacagtttcagagcgagccaatctggggtcagtgatagataaaaatccatcgggatagtcttttaaagcgctttcacagtccaactgctgcggatgcgactccggagtctggatcacggtcatctggaagaagaacgatgggaatcataatccgaaaacggtatcggacgattgtgtctcatcaaacccacaagcagccgctgtctgcgtcgctccgtgcgactgctgtttatgggatcagggtccacagtgtcctgaagcatgattttaatagcccttaacatcaactttctggtgcgatgcgcgcagcaacgcattctgatttcactcaaatctttgcagtaggtacaacacattattacaatattgtttaataaaccataattaaaagcgctccagccaaaactcatatctgatataatcgcccctgcatgaccatcataccaaagtttaatataaattaaatgacgttccctcaaaaacacactacccacatacatgatctcttttggcatgtgcatattaacaatctgtctgtaccatggacaacgttggttaatcatgcaacccaatataaccttccggaaccacactgccaacaccgctcccccagccatgcattgaagtgaaccctgctgattacaatgacaatgaagaacccaattctctcgaccgtgaatcacttgagaatgaaaaatatctatagtggcacaacatagacataaatgcatgcatcttctcataatttttaactcctcaggatttagaaacatatcccagggaataggaagctcttgcagaacagtaaagctggcagaacaaggaagaccacgaacacaacttacactatgcatagtcatagtatcacaatctggcaacagcgggtggtcttcagtcatagaagctcgggtttcattttcctcacaacgtggtaactgggctctggtgtaagggtgatgtctggcgcatgatgtcgagcgtgcgcgcaaccttgtcataatggagttgcttcctgacattctcgtattttgtatagcaaaacgcggccctggcagaacacactcttcttcgccttctatcctgccgcttagcgtgttccgtgtgatagttcaagtacaaccacactcttaagttggtcaaaagaatgctggcttcagttgtaatcaaaactccatcgcatctaatcgttctgaggaaatcatccaagcaatgcaactggattgtgtttcaagcaggagaggagagggaagagacggaagaaccatgttaatttttattccaaacgatctcgcagtacttcaaattgtagatcgcgcagatggcatctctcgcccccactgtgttggtgaaaaagcacagctagatcaaaagaaatgcgattttcaaggtgctcaacggtggcttccagcaaagcctccacgcgcacatccaagaacaaaagaataccaaaagaaggagcattttctaactcctcaatcatcatattacattcctgcaccattcccagataattttcagctttccagccttgaattattcgtgtcagttcttgtggtaaatccaatccacacattacaaacaggtcccggagggcgccctccaccaccattcttaaacacaccctcataatgacaaaatatcttgctcctgtgtcacctgtagcgaattgagaatggcaacatcaattgacatgcccttggctctaagttcttctttaagttctagttgtaaaaactctctcatattatcaccaaactgcttagccagaagccccccgggaacaagagcaggggacgctacagtgcagtacaagcgcagacctccccaattggctccagcaaaaacaagattggaataagcatattgggaaccgccagtaatatcatcgaagttgctggaaatataatcaggcagagtttcttgtaaaaattgaataaaagaaaaatttgccaaaaaaacattcaaaacctctgggatgcaaatgcaataggttaccgcgctgcgctccaacattgttagttttgaattagtctgcaaaaataaaaaaaaaaacaagcgtcatatcatagtagcctgacgaacagatggataaatcagtctttccatcacaagacaagccacagggtctccagctcgaccctcgtaaaacctgtcatcatgattaaacaacagcaccgaaagttcctcgcggtgaccagcatgaataattcttgatgaagcatacaatccagacatgttagcatcagttaacgagaaaaaacagccaacatagcctttgggtataattatgcttaatcgtaagtatagcaaagccacccctcgcggatacaaagtaaaaggcacaggagaataaaaaatataattatttctctgctgctgttcaggcaacgtcgcccccggtccctctaaatacacatacaaagcctcatcagccatggcttaccagacaaagtacagcgggcacacaaagcacaagctctaaagtgactctccaacctctccacaatatatatatacacaagccctaaactgacgtaatgggagtaaagtgtaaaaaatcccgccaaacccaacacacaccccgaaactgcgtcaccagggaaaagtacagtttcacttccgcaatcccaacaggcgtaacttcctctttctcacggtacgtgatatcccactaacttgcaacgtcattttcccacggtcgcaccgccccttttagccgttaaccccacagccaatcaccacacgatccacactttttaaaatcacctcatttacatattggcaccattccatctataaggtatattatatagataga

SEQ ID NO: 98 - DNA, 35791 bp, Artificial Sequence
  Genome sequence of NG-755 virus
tctatctatataatataccttatagatggaatggtgccaatatgtaaatgaggtgattttaaaaagtgtggatcgtgtggtgattggctgtggggttaacggctaaaaggggcggtgcgaccgtgggaaaatgacgttttgtgggggtggagtttttttgcaagttgtcgcgggaaatgtgacgcataaaaaggcttttttctcacggaactacttagttttcccacggtatttaacaggaaatgaggtagttttgaccggatgcaagtgaaaattgttgattttcgcgcgaaaactgaatgaggaagtgtttttctgaataatgtggtatttatggcagggtggagtatttgttcagggccaggtagactttgacccattacgtggaggtttcgattaccgtgttttttacctgaatttccgcgtaccgtgtcaaagtcttctgtttttacgtaggtgtcagctgatcgctagggtatttatacctcagggtttgtgtcaagaggccactcttgagtgccagcgagaagagttttctcctctgcgccggcagtttaataataaaaaaatgagagatttgcgatttctgcctcaggaaataatctctgctgagactggaaatgaaatattggagcttgtggtgcacgccctgatgggagacgatccggagccacctgtgcagctttttgagcctcctacgcttcaggaactgtatgatttagaggtagagggatcggaggattctaatgaggaagctgtaaatggcttttttaccgattctatgcttttagctgctaatgaagggttagaattagatccgcctttggacacttttgatactccaggggtaattgtggaaagcggtacaggtgtaagaaaattacctgatttgagttccgtggactgtgatttgcactgctatgaagacgggtttcctccgagtgatgaggaggaccatgaaaaggagcagtccatgcagactgcagcgggtgagggagtgaaggctgccaatgttggttttcagttggattgcccggagcttcctggacatggctgtaagtcttgtgaatttcacaggaaaaatactggagtaaaggaactgttatgttcgctttgttatatgagaacgcactgccactttatttacagtaagtgtgtttaagttaaaatttaaaggaatatgctgtttttcacatgtatattgagtgtgagttttgtgcttcttattataggtcctgtgtctgatgctgatgaatcaccatctcctgattctactacctcacctcctgagattcaagcacctgttcctgtggacgtgcgcaagcccattcctgtgaagcttaagcctgggaaacgtccagcagtggaaaaacttgaggacttgttacagggtggggacggacctttggacttgagtacacggaaacgtccaagacaataagtgttccatatccgtgtttacttaaggtgacgtcaatatttgtgtgacagtgcaatgtaataaaaatatgttaactgttcactggtttttattgctttttgggcggggactcaggtatataagtagaagcagacctgtgtggttagctcataggagctggctttcatccatggaggtttgggccattttggaagaccttaggaagactaggcaactgttagagaacgcttcggacggagtctccggtttttggagattctggttcgctagtgaattagctagggtagtttttaggataaaacaggactataaacaagaatttgaaaagttgttggtagattgcccaggactttttgaagctcttaatttgggccatcaggttcactttaaagaaaaagttttatcagttttagacttttcaaccccaggtagaactgctgctgctgtggcttttcttacttttatattagataaatggatcccgcagactcatttcagcaggggatacgttttggatttcatagccacagcattgtggagaacatggaaggttcgcaagatgaggacaatcttaggttactggccagtgcagcctttgggtgtagcgggaatcctgaggcatccaccggtcatgccagcggttctggaggaggaacagcaagaggacaacccgagagccggcctggaccctccagtggaggaggcggagtagctgacttgtctcctgaactgcaacgggtgcttactggatctacgtccactggacgggataggggcgttaagagggagagggcatctagtggtactgatgctagatctgagttggctttaagtttaatgagtcgcagacgtcctgaaaccatttggtggcatgaggttcagaaagagggaagggatgaagtttctgtattgcaggagaaatattcactggaacaggtgaaaacatgttggttggagcctgaggatgattgggaggtggccattaaaaattatgccaagatagctttgaggcctgataaacagtataagattactagacggattaatatccggaatgcttgttacatatctggaaatggggctgaggtggtaatagatactcaagacaaggcagttattagatgctgcatgatggatatgtggcctggggtagtcggtatggaagcagtaacttttgtaaatgttaagtttaggggagatggttataatggaatagtgtttatggccaataccaaacttatattgcatggttgtagcttttttggtttcaacaatacctgtgtagatgcctggggacaggttagtgtacggggatgtagtttctatgcgtgttggattgccacagctggcagaaccaagagtcaattgtctctgaagaaatgcatatttcaaagatgtaacctgggcattctgaatgaaggcgaagcaagggtccgccactgcgcttctacagatactggatgttttattttgattaagggaaatgccagcgtaaagcataacatgatttgcggtgcttccgatgagaggccttatcaaatgctcacttgtgctggtgggcattgtaatatgctggctactgtgcatattgtttcccatcaacgcaaaaaatggcctgtttttgatcacaatgtgatgacgaagtgtaccatgcatgcaggtgggcgtagaggaatgtttatgccttaccagtgtaacatgaatcatgtgaaagtgttgttggaaccagatgccttttccagaatgagcctaacaggaatttttgacatgaacatgcaaatctggaagatcctgaggtatgatgatacgagatcgagggtacgcgcatgcgaatgcggaggcaagcatgccaggttccagccggtgtgtgtagatgtgactgaagatctcagaccggatcatttggttattgcccgcactggagcagagttcggatccagtggagaagaaactgactaaggtgagtattgggaaaactttggggtgggattttcagatggacagattgagtaaaaatttgttttttctgtcttgcagctgtcatgagtggaaacgcttcttttaaggggggagtcttcagcccttatctgacagggcgtctcccatcctgggcaggagttcgtcagaatgttatgggatctactgtggatggaagacccgtccaacccgccaattcttcaacgctgacctatgctactttaagttcttcacctttggacgcagctgcagctgccgccgccgcttctgttgccgctaacactgtgcttggaatgggttactatggaagcatcatggctaattccacttcctctaataacccttctaccctgactcaggacaagttacttgtccttttggcccagctggaggctttgacccaacgtctgggtgaactttctcagcaggtggtcgagttgcgagtacaaactgagtctgctgtcggcacggcaaagtctaaataaaaaaatcccagaatcaatgaataaataaacaagcttgttgttgatttaaaatcaagtgtttttatttcatttttcgcgcacggtatgccctagaccaccgatctctatcattgagaactcggtggattttttccaggatcctatagaggtgggattgaatgtttagatacatgggcattaggccgtctttggggtggagatagctccattgaagggattcatgctccggggtagtgttgtaaatcacccagtcataacaaggtcgcagtgcatggtgttgcacaatatcttttagaagtaggctgattgccacagataagcccttggtgtaggtgtttacaaaccggttgagctgggatgggtgcattcggggtgaaattatgtgcattttggattggatttttaagttggcaatattgccgccaagatcccgtcttgggttcatgttatgaaggaccaccaagacggtgtatccggtacatttaggaaatttatcgtgcagcttggatggaaaagcgtggaaaaatttggagacacccttgtgtcctccaagattttccatgcactcatccatgataatagcaatggggccgtgggcagcggcgcgggcaaacacgttccgtgggtctgacacatcatagttatgttcctgagttaaatcatcataagccattttaatgaatttggggcggagagtaccagattggggtatgaatgttccttcgggccccggagcatagttcccctcacagatttgcatttcccaagctttcagttccgagggtggaatcatgtccacctggggggctatgaaaaacaccgtttctggggcgggggtgattaattgtgatgatagcaaatttctgagcaattgagatttgccacatccggtggggccataaatgattccgattacgggttgcaggtggtagtttagggaacggcaactgccgtcttctcgaagcaagggggccacctcgttcatcatttcccttacatgcatattttcccgcaccaaatccattaggaggcgctctcctcctagtgatagaagttcttgtagtgaggaaaagtttttcagcggtttcagaccgtcagccatgggcattttggagagagtttgctgcaaaagttctagtctgttccacagttcagtgatgtgttctatggcatctcgatccagcagacctcctcgtttcgcgggtttggacggctcctggaatagggtatgagacgatgggcgtccagcgctgccagggttcggtccttccagggtctcagtgttcgagtcagggttgtttccgtcacagtgaaggggtgtgcgcctgcttgggcgcttgccagggtgcgcttcagactcatcctgctggtcgaaaacttctgtcgcttggcgccctgtatgtcggccaagtagcagtttaccatgagttcgtagttgagcgcctcggctgcgtggcctttggcgcggagcttacctttggaagttttcttgcataccgggcagtataggcatttcagcgcatacaacttgggcgcaaggaaaacggattctggggagtatgcatctgcgccgcaggaggcgcaaacagtttcacattccaccagccaggttaaatccggttcattggggtcaaaaacaagttttccgccatattttttgatgcgtttcttacctttggtctccatgagttcgtgtcctcgttgagtgacaaacaggctgtccgtgtccccgtagactgattttacaggcctcttctccagtggagtgcctcggtcttcttcgtacaggaactctgaccactctgatacaaaggcgcgcgtccaggccagcacaaaggaggctatgtgggaggggtagcgatcgttgtcaaccagggggtccaccttttccaaagtatgcaaacacatgtcaccctcttcaacatccaggaatgtgattggcttgtaggtgtatttcacgtgacctggggtccccgctgggggggtataaaagggggcggttctttgctcttcctcactgtcttccggatcgctgtccaggaacgtcagctgttggggtaggtattccctctcgaaggcgggcatgacctctgcactcaggttgtcagtttctaagaacgaggaggatttgatattgacagtgccggttgagatgcctttcatgaggttttcgtccatctggtcagaaaacacaatttttttattgtcaagtttggtggcaaatgatccatacagggcgttggataaaagtttggcaatggatcgcatggtttggttcttttccttgtccgcgcgctctttggcggcgatgttgagttggacatactcgcgtgccaggcacttccattcggggaagatagttgttaattcatctggcacgattctcacttgccaccctcgattatgcaaggtaattaaatccacactggtggccacctcgcctcgaaggggttcattggtccaacagagcctacctcctttcctagaacagaaagggggaagtgggtctagcataagttcatcgggagggtctgcatccatggtaaagattcccggaagtaaatccttatcaaaatagctgatgggagtggggtcatctaaggccatttgccattctcgagctgccagtgcgcgctcatatgggttaaggggactgccccatggcatgggatgggtgagtgcagaggcatacatgccacagatgtcatagacgtagatgggatcctcaaagatgcctatgtaggttggatagcatcgcccccctctgatacttgctcgcacatagtcatatagttcatgtgatggcgctagcagccccggacccaagttggtgcgattgggtttttctgttctgtagacgatctggcgaaagatggcgtgagaattggaagagatggtgggtctttgaaaaatgttgaaatgggcatgaggtagacctacagagtctctgacaaagtgggcataagattcttgaagcttggttaccagttcggcggtgacaagtacgtctagggcgcagtagtcaagtgtttcttgaatgatgtcataacctggttggtttttcttttcccacagttcgcggttgagaaggtattcttcgcgatccttccagtactcttctagcggaaacccgtctttgtctgcacggtaagatcctagcatgtagaactgattaactgccttgtaagggcagcagcccttctctacgggtagagagtatgcttgagcagcttttcgtagcgaagcgtgagtaagggcaaaggtgtctctgaccatgactttgaggaattggtatttgaagtcgatgtcgtcacaggctccctgttcccagagttggaagtctacccgtttcttgtaggcggggttgggcaaagcgaaagtaacatcattgaagagaatcttgccggccctgggcatgaaattgcgagtgatgcgaaaaggctgtggtacttccgctcggttattgataacctgggcagctaggacgatctcgtcgaaaccgttgatgttgtgtcctacgatgtataattctatgaaacgcggcgtgcctctgacgtgaggtagcttactgagctcatcaaaggttaggtctgtggggtcagataaggcgtagtgttcgagagcccattcgtgcaggtgaggattcgctttaaggaaggaggaccagaggtccactgccagtgctgtttgtaactggtcccggtactgacgaaaatgccgtccgactgccattttttctggggtgacgcaatagaaggtttgggggtcctgccgccagcgatcccacttgagttttatggcgaggtcataggcgatgttgacgagccgctggtctccagagagtttcatgaccagcatgaaggggattagctgcttgccaaaggaccccatccaggtgtaggtttccacatcgtaggtgagaaagagcctttctgtgcgaggatgagagccaatcgggaagaactggatctcctgccaccagttggaggaatggctgttgatgtgatggaagtagaactccctgcgacgcgccgagcattcatgcttgtgcttgtacagacggccgcagtagtcgcagcgttgcacgggttgtatctcgtgaatgagttgtacctggcttcccttgacgagaaatttcagtgggaagccgaggcctggcgattgtatctcgtgctttactatgttgtctgcatcggcctgttcatcttctgtctcgatggtggtcatgctgacgagccctcgcgggaggcaagtccagacctcggcgcggcaggggcggagctcgaggacgagagcgcgcaggctggagctgtccagggtcctgagacgctgcggactcaggttagtaggcagtgtcaggagattaacttgcatgatcttttggagggcgtgcgggaggttcagatagtacttgatctcaacgggtccgttggtggagatgtcgatggcttgcagggttccgtgtcccttgggcgctaccaccgtgcccttgtttttcattttggacggcggtggctctgttgcttcttgcatgtttagaagcggtgtcgagggcgcgcaccgggcggcaggggcggctcgggacccggcggcatggctggcagtggtacgtcggcgccgcgcgcgggtaggttctggtactgcgccctgagaagactcgcatgcgcgacgacgcggcggttgacatcctggatctgacgcctctgggtgaaagctaccggccccgtgagcttgaacctgaaagagagttcaacagaatcaatctcggtatcgttgacggcggcttgcctaaggatttcttgcacgtcaccagagttgtcctggtaggcgatctccgccatgaactgctcgatctcttcctcttgaagatctccgcggcccgctctctcgacggtggccgcgaggtcgttggagatgcgcccaatgagttgagagaatgcattcatgcccgcctcgttccagacgcggctgtagaccacggcccccacgggatctctcgcgcgcatgaccacctgggcgaggttgagctccacgtggcgggtgaagaccgcatagttgcataggcgctggaaaaggtagttgagtgtggtggcgatgtgctcggtgacgaagaaatacatgatccatcgtctcagcggcatctcgctgacatcgcccagagcttccaagcgctccatggcctcgtagaagtccacggcaaaattaaaaaactgggagtttcgcgcggacacggtcaactcctcttccagaagacggataagttcggcgatggtggtgcgcacctcgcgctcgaaagcccctgggatttcttcctcaatctcttcttcttccactaacatctcttcctcttcaggtggggctgcaggaggagggggaacgcggcgacgccggcggcgcacgggcagacggtcgatgaatctttcaatgacctctccgcggcggcggcgcatggtttcagtgacggcgcggccgttctcgcgcggtcgcagagtaaaaacaccgccgcgcatctccttaaagtggtgactgggaggttctccgtttgggagggagagggcgctgattatacattttattaattggcccgtagggactgcacgcagagatctgatcgtgtcaagatccacgggatctgaaaacctttcgacgaaagcgtctaaccagtcacagtcacaaggtaggctgagtacggcttcttgtgggcgggggtggttatgtgttcggtctgggtcttctgtttcttcttcatctcgggaaggtgagacgatgctgctggtgatgaaattaaagtaggcagttctaagacggcggatggtggcgaggagcaccaggtctttgggtccggcttgctggatacgcaggcgattggccattccccaagcattatcctgacatctagcaagatctttgtagtagtcttgcatgagccgttctacgggcacttcttcctcacccgttctgccatgcatacgtgtgagtccaaatccgcgcattggttgtaccagtgccaagtcagctacgactctttcggcgaggatggcttgctgtacttgggtaagggtggcttgaaagtcatcaaaatccacaaagcggtggtaagctcctgtattaatggtgtaagcacagttggccatgactgaccagttaactgtctggtgaccagggcgcacgagctcggtgtatttaaggcgcgaataggcgcgggtgtcaaagatgtaatcgttgcaggtgcgcaccagatactggtaccctataagaaaatgcggcggtggttggcggtagagaggccatcgttctgtagctggagcgccaggggcgaggtcttccaacataaggcggtgatagccgtagatgtacctggacatccaggtgattcctgcggcggtagtagaagcccgaggaaactcgcgtacgcggttccaaatgttgcgtagcggcatgaagtagttcattgtaggcacggtttgaccagtgaggcgcgcgcagtcattgatgctctatagacacggagaaaatgaaagcgttcagcgactcgactccgtagcctggaggaacgtgaacgggttgggtcgcggtgtaccccggttcgagacttgtactcgagccggccggagccgcggctaacgtggtattggcactcccgtctcgacccagcctacaaaaatccaggatacggaatcgagtcgttttgctggtttccgaatggcagggaagtgagtcctattttttttttttgccgctcagatgcatcccgtgctgcgacagatgcgcccccaacaacagcccccctcgcagcagcagcagcagcaatcacaaaaggctgtccctgcaactactgcaactgccgccgtgagcggtgcgggacagcccgcctatgatctggacttggaagagggcgaaggactggcacgtctaggtgcgccttcacccgagcggcatccgcgagttcaactgaaaaaagattctcgcgaggcgtatgtgccccaacagaacctatttagagacagaagcggcgaggagccggaggagatgcgagcttcccgctttaacgcgggtcgtgagctgcgtcacggtttggaccgaagacgagtgttgcgggacgaggatttcgaagttgatgaaatgacagggatcagtcctgccagggcacacgtggctgcagccaaccttgtatcggcttacgagcagacagtaaaggaagagcgtaacttccaaaagtcttttaataatcatgtgcgaaccctgattgcccgcgaagaagttacccttggtttgatgcatttgtgggatttgatggaagctatcattcagaaccctactagcaaacctctgaccgcccagctgtttctggtggtgcaacacagcagagacaatgaggctttcagagaggcgctgctgaacatcaccgaacccgaggggagatggttgtatgatcttatcaacattctacagagtatcatagtgcaggagcggagcctgggcctggccgagaaggtggctgccatcaattactcggttttgagcttgggaaaatattacgctcgcaaaatctacaagactccatacgttcccatagacaaggaggtgaagatagatgggttctacatgcgcatgacgctcaaggtcttgaccctgagcgatgatcttggggtgtatcgcaatgacagaatgcatcgcgcggttagcgccagcaggaggcgcgagttaagcgacagggaactgatgcacagtttgcaaagagctctgactggagctggaaccgagggtgagaattacttcgacatgggagctgacttgcagtggcagcctagtcgcagggctctgagcgccgcgacggcaggatgtgagcttccttacatagaagaggcggatgaaggcgaggaggaagagggcgagtacttggaagactgatggcacaacccgtgttttttgctagatggaacagcaagcaccggatcccgcaatgcgggcggcgctgcagagccagccgtccggcattaactcctcggacgattggacccaggccatgcaacgtatcatggcgttgacgactcgcaaccccgaagcctttagacagcaaccccaggccaaccgtctatcggccatcatggaagctgtagtgccttcccgctctaatcccactcatgagaaggtcctggccatcgtgaacgcgttggtggagaacaaagctattcgtccagatgaggccggactggtatacaacgctctcttagaacgcgtggctcgctacaacagtagcaatgtgcaaaccaatttggaccgtatgataacagatgtacgcgaagccgtgtctcagcgcgaaaggttccagcgtgatgccaacctgggttcgctggtggcgttaaatgctttcttgagtactcagcctgctaatgtgccgcgtggtcaacaggattatactaactttttaagtgctttgagactgatggtatcagaagtacctcagagcgaagtgtatcagtccggtcctgattacttctttcagactagcagacagggcttgcagacggtaaatctgagccaagcttttaaaaaccttaaaggtttgtggggagtgcatgccccggtaggagaaagagcaaccgtgtctagcttgttaactccgaactcccgcctattattactgttggtagctcctttcaccgacagcggtagcatcgaccgtaattcctatttgggttacctactaaacctgtatcgcgaagccatagggcaaagtcaggtggacgagcagacctatcaagaaattacccaagtcagtcgcgctttgggacaggaagacactggcagtttggaagccactctgaacttcttgcttaccaatcggtctcaaaagatccctcctcaatatgctcttactgcggaggaggagaggatccttagatatgtgcagcagagcgtgggattgtttctgatgcaagagggggcaactccgactgcagcactggacatgacagcgcgaaatatggagcccagcatgtatgccagtaaccgacctttcattaacaaactgctggactacttgcacagagctgccgctatgaactctgattatttcaccaatgccatcttaaacccgcactggctgcccccacctggtttctacacgggcgaatatgacatgcccgaccctaatgacggatttctgtgggacgacgtggacagcgatgttttttcacctctttctgatcatcgcacgtggaaaaaggaaggcggcgatagaatgcattcttctgcatcgctgtccggggtcatgggtgctaccgcggctgagcccgagtctgcaagtccttttcctagtctacccttttctctacacagtgtacgtagcagcgaagtgggtagaataagtcgcccgagtttaatgggcgaagaggagtatctaaacgattccttgctcagaccggcaagagaaaaaaatttcccaaacaatggaatagaaagtttggtggataaaatgagtagatggaagacttatgctcaggatcacagagacgagcctgggatcatggggattacaagtagagcgagccgtagacgccagcgccatgacagacagaggggtcttgtgtgggacgatgaggattcggccgatgatagcagcgtgctggacttgggtgggagaggaaggggcaacccgtttgctcatttgcgccctcgcttgggtggtatgttgtaaaaaaaaataaaaaaaaaactcaccaaggccatggcgacgagcgtacgttcgttcttctttattatctgtgtctagtataatgaggcgagtcgtgctaggcggagcggtggtgtatccggagggtcctcctccttcgtacgagagcgtgatgcagcagcagcaggcgacggcggtgatgcaatccccactggaggctccctttgtgcctccgcgatacctggcacctacggagggcagaaacagcattcgttattcggaactggcacctcagtacgataccaccaggttgtatctggtggacaacaagtcggcggacattgcttctctgaactatcagaatgaccacagcaacttcttgaccacggtggtgcaaaacaatgactttacccctacggaagccagcacccagaccattaactttgatgaacgatcgcggtggggcggtcagctaaagaccatcatgcatactaacatgccaaacgtgaacgagtatatgtttagtaacaagttcaaagcgcgtgtgatggtgtccagaaaacctcccgacggtgctgcagttggggatacttatgatcacaagcaggatattttgaaatatgagtggttcgagtttactttgccagaaggcaacttttcagttactatgactattgatttgatgaacaatgccatcatagataattacttgaaagtgggtagacagaatggagtgcttgaaagtgacattggtgttaagttcgacaccaggaacttcaagctgggatgggatcccgaaaccaagttgatcatgcctggagtgtatacgtatgaagccttccatcctgacattgtcttactgcctggctgcggagtggattttaccgagagtcgtttgagcaaccttcttggtatcagaaaaaaacagccatttcaagagggttttaagattttgtatgaagatttagaaggtggtaatattccggccctcttggatgtagatgcctatgagaacagtaagaaagaacaaaaagccaaaatagaagctgctacagctgctgcagaagctaaggcaaacatagttgccagcgactctacaagggttgctaacgctggagaggtcagaggagacaattttgcgccaacacctgttccgactgcagaatcattattggccgatgtgtctgaaggaacggacgtgaaactcactattcaacctgtagaaaaagatagtaagaatagaagctataatgtgttggaagacaaaatcaacacagcctatcgcagttggtatctttcgtacaattatggcgatcccgaaaaaggagtgcgttcctggacattgctcaccacctcagatgtcacctgcggagcagagcaggtctactggtcgcttccagacatgatgaaggatcctgtcactttccgctccactagacaagtcagtaactaccctgtggtgggtgcagagcttatgcccgtcttctcaaagagcttctacaacgaacaagctgtgtactcccagcagctccgccagtccacctcgcttacgcacgtcttcaaccgctttcctgagaaccagattttaatccgtccgccggcgcccaccattaccaccgtcagtgaaaacgttcctgctctcacagatcacgggaccctgccgttgcgcagcagtatccggggagtccaacgtgtgaccgttactgacgccagacgccgcacctgtccctacgtgtacaaggcactgggcatagtcgcaccgcgcgtcctttcaagccgcactttctaaaaaaaaaaaaaatgtccattcttatctcgcccagtaataacaccggttggggtctgcgcgctccaagcaagatgtacggaggcgcacgcaaacgttctacccaacatcctgtccgtgttcgcggacattttcgcgctccatggggcgccctcaagggccgcactcgcgttcgaaccaccgtcgatgatgtaatcgatcaggtggttgccgacgcccgtaattatactcctactgcgcctacatctactgtggatgcagttattgacagtgtagtggctgacgctcgcaactatgctcgacgtaagagccggcgaaggcgcattgccagacgccaccgagctaccactgccatgcgagccgcaagagctctgctacgaagagctagacgcgtggggcgaagagccatgcttagggcggccagacgtgcagcttcgggcgccagcgccggcaggtcccgcaggcaagcagccgctgtcgcagcggcgactattgccgacatggcccaatcgcgaagaggcaatgtatactgggtgcgtgacgctgccaccggtcaacgtgtacccgtgcgcacccgtccccctcgcacttagaagatactgagcagtctccgatgttgtgtcccagcggcgaggatgtccaagcgcaaatacaaggaagaaatgctgcaggttatcgcacctgaagtctacggccaaccgttgaaggatgaaaaaaaaccccgcaaaatcaagcgggttaaaaaggacaaaaaagaagaggaagatggcgatgatgggctggcggagtttgtgcgcgagtttgccccacggcgacgcgtgcaatggcgtgggcgcaaagttcgacatgtgttgagacctggaacttcggtggtctttacacccggcgagcgttcaagcgctacttttaagcgttcctatgatgaggtgtacggggatgatgatattcttgagcaggcggctgaccgattaggcgagtttgcttatggcaagcgtagtagaataacttccaaggatgagacagtgtcgatacccttggatcatggaaatcccacccctagtcttaaaccggtcactttgcagcaagtgttacccgtaactccgcgaacaggtgttaaacgcgaaggtgaagatttgtatcccactatgcaactgatggtacccaaacgccagaagttggaggacgttttggagaaagtaaaagtggatccagatattcaacctgaggttaaagtgagacccattaagcaggtagcgcctggtctgggggtacaaactgtagacattaagattcccactgaaagtatggaagtgcaaactgaacccgcaaagcctactgccacctccactgaagtgcaaacggatccatggatgcccatgcctattacaactgacgccgccggtcccactcgaagatcccgacgaaagtacggtccagcaagtctgttgatgcccaattatgttgtacacccatctattattcctactcctggttaccgaggcactcgctactatcgcagccgaaacagtacctcccgccgtcgccgcaagacacctgcaaatcgcagtcgtcgccgtagacgcacaagcaaaccgactcccggcgccctggtgcggcaagtgtaccgcaatggtagtgcggaacctttgacactgccgcgtgcgcgttaccatccgagtatcatcacttaatcaatgttgccgctgcctccttgcagatatggccctcacttgtcgccttcgcgttcccatcactggttaccgaggaagaaactcgcgccgtagaagagggatgttgggacgcggaatgcgacgctacaggcgacggcgtgctatccgcaagcaattgcggggtggttttttaccagccttaattccaattatcgctgctgcaattggcgcgataccaggcatagcttccgtggcggttcaggcctcgcaacgacattgacattggaaaaaaacgtataaataaaaaaaaaaaaatacaatggactctgacactcctggtcctgtgactatgttttcttagagatggaagacatcaatttttcatccttggctccgcgacacggcacgaagccgtacatgggcacctggagcgacatcggcacgagccaactgaacgggggcgccttcaattggagcagtatctggagcgggcttaaaaattttggctcaaccataaaaacatacgggaacaaagcttggaacagcagtacaggacaggcgcttagaaataaacttaaagaccagaacttccaacaaaaagtagtcgatgggatagcttccggcatcaatggagtggtagatttggctaaccaggctgtgcagaaaaagataaacagtcgtttggacccgccgccagcaaccccaggtgaaatgcaagtggaggaagaaattcctccgccagaaaaacgaggcgacaagcgtccgcgtcccgatttggaagagacgctggtgacgcgcgtagatgaaccgccttcttatgaggaagcaacgaagcttggaatgcccaccactagaccgatagccccaatggccaccggggtgatgaaaccttctcagttgcatcgacccgtcaccttggatttgccccctccccctgctgctactgctgtacccgcttctaagcctgtcgctgccccgaaaccagtcgccgtagccaggtcacgtcccgggggcgctcctcgtccaaatgcgcactggcaaaatactctgaacagcatcgtgggtctaggcgtgcaaagtgtaaaacgccgtcgctgcttttaattaaatatggagtagcgcttaacttgcctatctgtgtatatgtgtcattacacgccgtcacagcagcagaggaaaaaaggaagaggtcgtgcgtcgacgctgagttactttcaagatggccaccccatcgatgctgccccaatgggcatacatgcacatcgccggacaggatgcttcggagtacctgagtccgggtctggtgcagttcgcccgcgccacagacacctacttcaatctgggaaataagtttagaaatcccaccgtagcgccgacccacgatgtgaccaccgaccgtagccagcggctcatgttgcgcttcgtgcccgttgaccgggaggacaatacatactcttacaaagtgcggtacaccctggccgtgggcgacaacagagtgctggatatggccagcacgttctttgacattaggggtgtgttggacagaggtcccagtttcaaaccctattctggtacggcttacaactccctggctcctaaaggcgctccaaatacatctcagtggattgcagaaggtgtaaaaaatacaactggtgaggaacacgtaacagaagaggaaaccaatactactacttacacttttggcaatgctcctgtaaaagctgaagctgaaattacaaaagaaggactcccagtaggtttggaagtttcagatgaagaaagtaaaccgatttatgctgataaaacatatcagccagaacctcagctgggagatgaaacttggactgaccttgatggaaaaaccgaaaagtatggaggcagggctctcaaacccgatactaagatgaaaccatgctacgggtcctttgccaaacctactaatgtgaaaggcggtcaggcaaaacaaaaaacaacggagcagccaaatcagaaagtcgaatatgatatcgacatggagttttttgatgcggcatcgcagaaaacaaacttaagtcctaaaattgtcatgtatgcagaaaatgtaaatttggaaactccagacactcatgtagtgtacaaacctggaacagaagacacaagttccgaagctaatttgggacaacaatctatgcccaacagacccaactacattggcttcagagataactttattggacttatgtactataacagtactggtaacatgggggtgctggctggtcaagcgtctcagttaaatgcagtggttgacttgcaggacagaaacacagaactttcttaccaactcttgcttgactctctgggcgacagaaccagatactttagcatgtggaatcaggctgtggacagttatgatcctgatgtacgtgttattgaaaatcatggtgtggaagatgaacttcccaactactgttttccactggacggcataggtgttccaacaaccagttacaaatcaatagttccaaatggagacaatgcgcctaattggaaggaacctgaagtaaatggaacaagtgagatcggacagggtaatttgtttgccatggaaattaaccttcaagccaatctatggcgaagtttcctttattccaatgtggctctatatctcccagactcgtacaaatacaccccgtccaatgtcactcttccagaaaacaaaaacacctacgactacatgaacgggcgggtggtgccgccatctctagtagacacctatgtgaacattggtgccaggtggtctctggatgccatggacaatgtcaacccattcaaccaccaccgtaacgctggcttgcgttaccgatccatgcttctgggtaacggacgttatgtgcctttccacatacaagtgcctcaaaaattcttcgctgttaaaaacctgctgcttctcccaggctcctacacttatgagtggaactttaggaaggatgtgaacatggttctacagagttccctcggtaacgacctgcgggtagatggcgccagcatcagtttcacgagcatcaacctctatgctacttttttccccatggctcacaacaccgcttccacccttgaagccatgctgcggaatgacaccaatgatcagtcattcaacgactacctatctgcagctaacatgctctaccccattcctgccaatgcaaccaatattcccatttccattccttctcgcaactgggcggctttcagaggctggtcatttaccagactgaaaaccaaagaaactccctctttggggtctggatttgacccctactttgtctattctggttctattccctacctggatggtaccttctacctgaaccacacttttaagaaggtttccatcatgtttgactcttcagtgagctggcctggaaatgacaggttactatctcctaacgaatttgaaataaagcgcactgtggatggcgaaggctacaacgtagcccaatgcaacatgaccaaagactggttcttggtacagatgctcgccaactacaacatcggctatcagggcttctacattccagaaggatacaaagatcgcatgtattcatttttcagaaacttccagcccatgagcaggcaggtggttgatgaggtcaattacaaagacttcaaggccgtcgccataccctaccaacacaacaactctggctttgtgggttacatggctccgaccatgcgccaaggtcaaccctatcccgctaactatccctatccactcattggaacaactgccgtaaatagtgttacgcagaaaaagttcttgtgtgacagaaccatgtggcgcataccgttctcgagcaacttcatgtctatgggggcccttacagacttgggacagaatatgctctatgccaactcagctcatgctctggacatgacctttgaggtggatcccatggatgagcccaccctgctttatcttctcttcgaagttttcgacgtggtcagagtgcatcagccacaccgcggcatcatcgaggcagtctacctgcgtacaccgttctcggccggtaacgctaccacgtaagaagcttcttgcttcttgcaaatagcagctgcaaccatggcctgcggatcccaaaacggctccagcgagcaagagctcagagccattgtccaagacctgggttgcggaccctattttttgggaacctacgataagcgcttcccggggttcatggcccccgataagctcgcctgtgccattgtaaatacggccggacgtgagacggggggagagcactggttggctttcggttggaacccacgttctaacacctgctacctttttgatccttttggattctcggatgatcgtctcaaacagatttaccagtttgaatatgagggtctcctgcgccgcagcgctcttgctaccaaggaccgctgtattacgctggaaaaatctacccagaccgtgcagggtccccgttctgccgcctgcggacttttctgctgcatgttccttcacgcctttgtgcactggcctgaccgtcccatggacggaaaccccaccatgaaattgctaactggagtgccaaacaacatgcttcattctcctaaagtccagcccaccctgtgtgacaatcaaaaagcactctaccattttcttaatacccattcgccttattttcgctcccatcgtacacacatcgaaagggccactgcgttcgaccgtatggatgttcaataatgactcatgtaaacaacgtgttcaataaacatcactttatttttttacatgtatcaaggctctgcattacttatttatttacaagtcgaatgggttctgacgagaatcagaatgacccgcaggcagtgatacgttgcggaactgatacttgggttgccacttgaattcgggaatcaccaacttgggaaccggtatatcgggcaggatgtcactccacagctttctggtcagctgcaaagctccaagcaggtcaggagccgaaatcttgaaatcacaattaggaccagtgctttgagcgcgagagttgcggtacaccggattgcagcactgaaacaccatcagcgacggatgtctcacgcttgccagcacggtgggatctgcaatcatgcccacatccagatcttcagcattggcaatgctgaacggggtcatcttgcaggtctgcctacccatggcgggcacccaattaggcttgtggttgcaatcgcagtgcagggggatcagtatcatcttggcctgatcctgtctgattcctggatacacggctctcatgaaagcatcatattgcttgaaagcctgctgggctttactaccctcggtataaaacatcccgcaggacctgctcgaaaactggttagctgcacagccggcatcattcacacagcagcgggcgtcattgttagctatttgcaccacacttctgccccagcggttttgggtgattttggttcgctcgggattctcctttaaggctcgttgtccgttctcgctggccacatccatctcgataatctgctccttctgaatcataatattgccatgcaggcacttcagcttgccctcataatcattgcagccatgaggccacaacgcacagcctgtacattcccaattatggtgggcgatctgagaaaaagaatgtatcattccctgcagaaatcttcccatcatcgtgctcagtgtcttgtgactagtgaaagttaactggatgcctcggtgctcctcgtttacgtactggtgacagatgcgcttgtattgttcgtgttgctcaggcattagtttaaaagaggttctaagttcgttatccagcctgtacttctccatcagcagacacatcacttccatgcctttctcccaagcagacaccaggggcaagctaatcggattcttaacagtgcaggcagcagctcctttagccagagggtcatctttagcgatcttctcaatgcttcttttgccatccttctcaacgatgcgcacgggcgggtagctgaaacccactgctacaagttgcgcctcttctctttcttcttcgctgtcttgactgatgtcttgcatggggatatgtttggtcttccttggcttctttttggggggtatcggaggaggaggactgtcgctccgttccggagacagggaggattgtgacgtttcgctcaccattaccaactgactgtcggtagaagaacctgaccccacacggcgacaggtgtttctcttcgggggcagaggtggaggcgattgcgaagggctgcggtccgacctggaaggcggatgactggcagaaccccttccgcgttcgggggtgtgctccctgtggcggtcgcttaactgatttccttcgcggctggccattgtgttctcctaggcagagaaacaacagacatggaaactcagccattgctgtcaacatcgccacgagtgccatcacatctcgtcctcagcgacgaggaaaaggagcagagcttaagcattccaccgcccagtcctgccaccacctctaccctagaagataaggaggtcgacgcatctcatgacatgcagaataaaaaagcgaaagagtctgagacagacatcgagcaagacccgggctatgtgacaccggtggaacacgaggaagagttgaaacgctttctagagagagaggatgaaaactgcccaaaacaacgagcagataactatcaccaagatgctggaaatagggatcagaacaccgactacctcatagggcttgacggggaagacgcgctccttaaacatctagcaagacagtcgctcatagtcaaggatgcattattggacagaactgaagtgcccatcagtgtggaagagctcagccgcgcctacgagcttaacctcttttcacctcgtactccccccaaacgtcagccaaacggcacctgcgagccaaatcctcgcttaaacttttatccagcttttgctgtgccagaagtactggctacctatcacatcttttttaaaaatcaaaaaattccagtctcctgccgcgctaatcgcacccgcgccgatgccctactcaatctgggacctggttcacgcttacctgatatagcttccttggaagaggttccaaagatcttcgagggtctgggcaataatgagactcgggccgcaaatgctctgcaaaagggagaaaatggcatggatgagcatcacagcgttctggtggaattggaaggcgataatgccagactcgcagtactcaagcgaagcatcgaggtcacacacttcgcatatcccgctgtcaacctgccccctaaagtcatgacggcggtcatggaccagttactcattaagcgcgcaagtcccctttcagaagacatgcatgacccagatgcctgtgatgagggtaaaccagtggtcagtgatgagcagctaacccgatggctgggcaccgactctcccagggatttggaagagcgtcgcaagcttatgatggccgtggtgctggttaccgtagaactagagtgtctccgacgtttctttaccgattcagaaaccttgcgcaaactcgaagagaatctgcactacacttttagacacggctttgtgcggcaggcatgcaagatatctaacgtggaactcaccaacctggtttcctacatgggtattctgcatgagaatcgcctaggacaaagcgtgctgcacagcaccctgaagggggaagcccgccgtgattacatccgcgattgtgtctatctgtacctgtgccacacgtggcaaaccggcatgggtgtatggcagcaatgtttagaagaacagaacttgaaagagcttgacaagctcttacagaaatctcttaaggttctgtggacagggttcgacgagcgcaccgtcgcttccgacctggcagacctcatcttcccagagcgtctcagggttactttgcgaaacggattgcctgactttatgagccagagcatgcttaacaattttcgctctttcatcctggaacgctccggtatcctgcccgccacctgctgcgcactgccctccgactttgtgcctctcacctaccgcgagtgccccccgccgctatggagtcactgctacctgttccgtctggccaactatctctcctaccactcggatgtgatcgaggatgtgagcggagacggcttgctggagtgtcactgccgctgcaatctgtgcacgccccaccggtccctagcttgcaacccccagttgatgagcgaaacccagataataggcacctttgaattgcaaggccccagcagccaaggcgatgggtcttctcctgggcaaagtttaaaactgaccccgggactgtggacctccgcctacttgcgcaagtttgctccggaagattaccacccctatgaaatcaagttctatgaggaccaatcacagcctccaaaggccgaactttcggcctgcgtcatcacccagggggcaattctggcccaattgcaagccatccaaaaatcccgccaagaatttctactgaaaaagggtaagggggtctaccttgacccccagaccggcgaggaactcaacacaaggttccctcaggatgtcccaacgacgagaaaacaagaagttgaaggtgcagccgccgcccccagaagatatggaggaagattgggacagtcaggcagaggaggcggaggaggacagtctggaggacagtctggaggaagacagtttggaggaggaaaacgaggaggcagaggaggtggaagaagtaaccgccgacaaacagttatcctcggctgcggagacaagcaacagcgctaccatctccgctccgagtcgaggaacccggcggcgtcccagcagtagatgggacgagaccggacgcttcccgaacccaaccagcgcttccaagaccggtaagaaggatcggcagggatacaagtcctggcgggggcataagaatgccatcatctcctgcttgcatgagtgcgggggcaacatatccttcacgcggcgctacttgctattccaccatggggtgaactttccgcgcaatgttttgcattactaccgtcacctccacagcccctactatagccagcaaatcccggcagtctcgacagataaagacagcggcggcgacctccaacagaaaaccagcagcggcagttagaaaatacacaacaagtgcagcaacaggaggattaaagattacagccaacgagccagcgcaaacccgagagttaagaaatcggatctttccaaccctgtatgccatcttccagcagagtcggggtcaagagcaggaactgaaaataaaaaaccgatctctgcgttcgctcaccagaagttgtttgtatcacaagagcgaagatcaacttcagcgcactctcgaggacgccgaggctctcttcaacaagtactgcgcgctgactcttaaagagtaggcagcgaccgcgcttattcaaaaaaggcgggaattacatcatcctcgacatgagtaaagaaattcccacgccttacatgtggagttatcaaccccaaatgggattggcggcaggcgcctcccaggactactccacccgcatgaattggctcagcgccgggccttctatgatttctcgagttaatgatatacgcgcctaccgaaaccaaatacttttggaacagtcagctcttaccaccacgccccgccaacaccttaatcccagaaattggcccgccgccctagtgtaccaggaaagtcccgctcccaccactgtattacttcctcgagacgcccaggccgaagtccaaatgactaatgcaggtgcgcagttagctggcggctccaccctatgtcgtcacaggcctcggcataatataaaacgcctgatgatcagaggccgaggtatccagctcaacgacgagtcggtgagctctccgcttggtctacgaccagacggaatctttcagattgccggctgcgggagatcttccttcacccctcgtcaggctgttctgactttggaaagttcgtcttcgcaaccccgctcgggcggaatcgggaccgttcaatttgtggaggagtttactccctctgtctacttcaaccccttctccggatctcctgggcattacccggacgagttcataccgaacttcgacgcgattagcgagtcagtggacggctacgattgatgtctggtgacgcggctgagctatctcggctgcgacatctagaccactgccgccgctttcgctgctttgcccgggaactcattgagttcatctacttcgaactccccaaggatcaccctcaaggtccggcccacggagtgcggatttctatcgaaggcaaaatagactctcgcctgcaacgaattttctcccagcggcccgtgctgatcgagcgagaccagggaaacaccacggtttccatctactgcatttgtaatcaccccggattgcatgaaagcctttgctgtcttatgtgtactgagtttaataaaaactgaattaagactctcctacggactgccgcttcttcaacccggattttacaaccagaagaacgaaacttttcctgtcgtccaggactctgttaacttcacctttcctactcacaaactagaagctcaacgactacaccgcttttccagaagcattttccctactaatactactttcaaaaccggaggtgagctccaaggtcttcctacagaaaacccttgggtggaagcgggccttgtagtgctaggaattcttgcgggtgggcttgtgattattctttgctacctatacacaccttgcttcactttcttagtggtgttgtggtattggtttaaaaaatggggcccatactagtcttgcttgttttactttcgcttttggaaccgggttctgccaattacgatccatgtctagacttcgacccagaaaactgcacacttacttttgcacccgacacaagccgcatctgtggagttcatcgcctctcttacgaacttggcccccaacgacaaaaatttacctgcatggtgggaatcaaccccatagttatcacccagcaaagtggagatactaagggttgcattcactgctcctgcgattccatcgagtgcacctacaccctgctgaagaccctatgcggcctaagagacctgctaccaatgaattaaaaaatgattaataaaaaatcacttacttgaaatcagcaataaggtctctgttgaaattttctcccagcagcacctcacttccctcttcccaactctggtattctaaaccccgttcagcggcatactttctccatactttaaaggggatgtcaaattttagctcctctcctgtacccacaatcttcatgtctttcttcccagatgaccaagagagtccggctcagtgactccttcaaccctgtctacccctatgaagatgaaagcacctcccaacacccctttataaacccagggtttatttccccaaatggcttcacacaaagcccaaacggagttcttactttaaaatgtttaaccccactaacaaccacaggcggatctctacagctaaaagtgggagggggacttacagtggatgacaccaacggttttttgaaagaaaacataagtgccaccacaccactcgttaagactggtcactctataggtttaccactaggagccggattgggaacgaatgaaaataaactttgtatcaaattaggacaaggacttacattcaattcaaacaacatttgcattgatgacaatattaacaccttatggacaggagtcaaccccaccgaagccaactgtcaaatcatgaactccagtgaatctaatgattgcaaattaattctaacactagttaaaactggagcactagtcactgcatttgtttatgttataggagtatctaacaattttaatatgctaactacacacagaaatataaattttactgcagagctgtttttcgattctactggtaatttactaactagactctcatccctcaaaactccacttaatcataaatcaggacaaaacatggctactggtgccattactaatgctaaaggtttcatgcccagcacgactgcctatcctttcaatgataattctagagaaaaagaaaactacatttacggaacttgttactacacagctagtgatcgcactgcttttcccattgacatatctgtcatgcttaaccgaagagcaataaatgacgagacatcatattgtattcgtataacttggtcctggaacacaggagatgccccagaggtgcaaacctctgctacaaccctagtcacctccccatttaccttttactacatcagagaagacgactgacaaataaagtttgcgatcgccaggcccaccatggactggacctggcgcatcctgttcttggtggcagctgctacgggagctcattccaactgggtgaatgtaataagtgatttgaaaaaaattgaagatcttattcaatctatgcatattgatgctactttatatacggaaagtgatgttcaccccagttgcaaagtaacagcaatgaagtgctttctcttggagttacaagttatttcacttgagtccggagatgcaagtattcatgatacagtagaaaatctgatcatcctagcaaacaacagtttgtcttctaatgggaatgtaacagaatctggatgcaaagaatgtgaggaactggaggaaaaaaatattaaagaatttttgcagagttttgtacatattgtccaaatgttcatcaacacttctggaagcggagctactaacttcagcctgctgaagcaggctggagacgtggaggagaaccctggacctgccttgacctttgctttactggtggccctcctggtgctcagctgcaagtcaagctgctctgtgggctgtgatctgcctcaaacccacagcctgggtagcaggaggaccttgatgctcctggcacagatgaggagaatctctcttttctcctgcttgaaggacagacatgactttggatttccccaggaggagtttggcaaccagttccaaaaggctgaaaccatccctgtcctccatgagatgatccagcagatcttcaatctcttcagcacaaaggactcatctgctgcttgggatgagaccctcctagacaaattctacactgaactctaccagcagctgaatgacctggaagcctgtgtgatacagggggtgggggtgacagagactcccctgatgaaggaggactccattctggctgtgaggaaatacttccaaagaatcactctctatctgaaagagaagaaatacagcccttgtgcctgggaggttgtcagagcagaaatcatgagatctttttctttgtcaacaaacttgcaagaaagtttaagaagtaaggaaggaagcggacagtgtactaattatgctctcttgaaattggctggagatgttgagagcaaccctggacctaagaaaagtggtgttcttttcctcttgggcatcatcttgctggttctgattggagtgcaaggaaccccagtagtgagaaagggtcgctgttcctgcatcagcaccaaccaagggactatccacctacaatccttgaaagaccttaaacaatttgccccaagcccttcctgcgagaaaattgaaatcattgctacactgaagaatggagttcaaacatgtctaaacccagattcagcagatgtgaaggaactgattaaaaagtgggagaaacaggtcagccaaaagaaaaagcaaaagaatgggaaaaaacatcaaaaaaagaaagttctgaaagttcgaaaatctcaacgttctcgtcaaaagaagactacaggaagcggagtgaaacagactttgaattttgaccttctcaagttggcgggagacgtggagtccaaccctggacctatgtgtcaccagcagttggtcatctcttggttttccctggtttttctggcatctcccctcgtggccatatgggaactgaagaaagatgtttatgtcgtagaattggattggtatccggatgcccctggagaaatggtggtcctcacctgtgacacccctgaagaagatggtatcacctggaccttggaccagagcagtgaggtcttaggctctggcaaaaccctgaccatccaagtcaaagagtttggagatgctggccagtacacctgtcacaaaggaggcgaggttctaagccattcgctcctgctgcttcacaaaaaggaagatggaatttggtccactgatattttaaaggaccagaaagaacccaaaaataagacctttctaagatgcgaggccaagaattattctggacgtttcacctgctggtggctgacgacaatcagtactgatttgacattcagtgtcaaaagcagcagaggctcttctgacccccaaggggtgacgtgcggagctgctacactctctgcagagagagtcagaggggacaacaaggagtatgagtactcagtggagtgccaggaggacagtgcctgcccagctgctgaggagagtctgcccattgaggtcatggtggatgccgttcacaagctcaagtatgaaaactacaccagcagcttcttcatcagggacatcatcaaacctgacccacccaagaacttgcagctgaagccattaaagaattctcggcaggtggaggtcagctgggagtaccctgacacctggagtactccacattcctacttctccctgacattctgcgttcaggtccagggcaagagcaagagagaaaagaaagatagagtcttcacggacaagacctcagccacggtcatctgccgcaaaaatgccagcattagcgtgcgggcccaggaccgctactatagctcatcttggagcgaatgggcatctgtgccctgcagtggagggggcggcagcgggggaggcggcagcggcggcgggggatcgagaaacctccccgtggccactccagacccaggaatgttcccatgccttcaccactcccaaaacctgctgagggccgtcagcaacatgctccagaaggccagacaaactctagaattttacccttgcacttctgaagagattgatcatgaagatatcacaaaagataaaaccagcacagtggaggcctgtttaccattggaattaaccaagaatgagagttgcctaaattccagagagacctctttcataactaatgggagttgcctggcctccagaaagacctcttttatgatggccctgtgccttagtagtatttatgaagacttgaagatgtaccaggtggagttcaagaccatgaatgcaaagcttctgatggatcctaagaggcagatctttctagatcaaaacatgctggcagttattgatgagctgatgcaggccctgaatttcaacagtgagactgtgccacaaaaatcctcccttgaagaaccggatttttataaaactaaaatcaagctctgcatacttcttcatgctttcagaattcgggcagtgactattgatagagtgatgagctatctgaatgcttcctaagctagcttgactgactgagatacagcgtaccttcagctcacagacatgataagatacattgatgagtttggacaaaccacaactagaatgcagtgaaaaaaatgctttatttgtgaaatttgtgatgctattgctttatttgtaaccattataagctgcaataaacaagttaacaacaacaattgcattcattttatgtttcaggttcagggggaggtgtgggaggttttttaaagcaagtaaaacctctacaaatgtggtagtcgtcagctatcctgcaggaacttgtttatttgaaaatcaattcacaaaatccgagtagttattttgcctcccccttcccatttaacagaatacaccaatctctccccacgcacagctttaaacatttggataccattagatatagacatggttttagattccacattccaaacagtttcagagcgagccaatctggggtcagtgatagataaaaatccatcgggatagtcttttaaagcgctttcacagtccaactgctgcggatgcgactccggagtctggatcacggtcatctggaagaagaacgatgggaatcataatccgaaaacggtatcggacgattgtgtctcatcaaacccacaagcagccgctgtctgcgtcgctccgtgcgactgctgtttatgggatcagggtccacagtgtcctgaagcatgattttaatagcccttaacatcaactttctggtgcgatgcgcgcagcaacgcattctgatttcactcaaatctttgcagtaggtacaacacattattacaatattgtttaataaaccataattaaaagcgctccagccaaaactcatatctgatataatcgcccctgcatgaccatcataccaaagtttaatataaattaaatgacgttccctcaaaaacacactacccacatacatgatctcttttggcatgtgcatattaacaatctgtctgtaccatggacaacgttggttaatcatgcaacccaatataaccttccggaaccacactgccaacaccgctcccccagccatgcattgaagtgaaccctgctgattacaatgacaatgaagaacccaattctctcgaccgtgaatcacttgagaatgaaaaatatctatagtggcacaacatagacataaatgcatgcatcttctcataatttttaactcctcaggatttagaaacatatcccagggaataggaagctcttgcagaacagtaaagctggcagaacaaggaagaccacgaacacaacttacactatgcatagtcatagtatcacaatctggcaacagcgggtggtcttcagtcatagaagctcgggtttcattttcctcacaacgtggtaactgggctctggtgtaagggtgatgtctggcgcatgatgtcgagcgtgcgcgcaaccttgtcataatggagttgcttcctgacattctcgtattttgtatagcaaaacgcggccctggcagaacacactcttcttcgccttctatcctgccgcttagcgtgttccgtgtgatagttcaagtacaaccacactcttaagttggtcaaaagaatgctggcttcagttgtaatcaaaactccatcgcatctaatcgttctgaggaaatcatccaagcaatgcaactggattgtgtttcaagcaggagaggagagggaagagacggaagaaccatgttaatttttattccaaacgatctcgcagtacttcaaattgtagatcgcgcagatggcatctctcgcccccactgtgttggtgaaaaagcacagctagatcaaaagaaatgcgattttcaaggtgctcaacggtggcttccagcaaagcctccacgcgcacatccaagaacaaaagaataccaaaagaaggagcattttctaactcctcaatcatcatattacattcctgcaccattcccagataattttcagctttccagccttgaattattcgtgtcagttcttgtggtaaatccaatccacacattacaaacaggtcccggagggcgccctccaccaccattcttaaacacaccctcataatgacaaaatatcttgctcctgtgtcacctgtagcgaattgagaatggcaacatcaattgacatgcccttggctctaagttcttctttaagttctagttgtaaaaactctctcatattatcaccaaactgcttagccagaagccccccgggaacaagagcaggggacgctacagtgcagtacaagcgcagacctccccaattggctccagcaaaaacaagattggaataagcatattgggaaccgccagtaatatcatcgaagttgctggaaatataatcaggcagagtttcttgtaaaaattgaataaaagaaaaatttgccaaaaaaacattcaaaacctctgggatgcaaatgcaataggttaccgcgctgcgctccaacattgttagttttgaattagtctgcaaaaataaaaaaaaaaacaagcgtcatatcatagtagcctgacgaacagatggataaatcagtctttccatcacaagacaagccacagggtctccagctcgaccctcgtaaaacctgtcatcatgattaaacaacagcaccgaaagttcctcgcggtgaccagcatgaataattcttgatgaagcatacaatccagacatgttagcatcagttaacgagaaaaaacagccaacatagcctttgggtataattatgcttaatcgtaagtatagcaaagccacccctcgcggatacaaagtaaaaggcacaggagaataaaaaatataattatttctctgctgctgttcaggcaacgtcgcccccggtccctctaaatacacatacaaagcctcatcagccatggcttaccagacaaagtacagcgggcacacaaagcacaagctctaaagtgactctccaacctctccacaatatatatatacacaagccctaaactgacgtaatgggagtaaagtgtaaaaaatcccgccaaacccaacacacaccccgaaactgcgtcaccagggaaaagtacagtttcacttccgcaatcccaacaggcgtaacttcctctttctcacggtacgtgatatcccactaacttgcaacgtcattttcccacggtcgcaccgccccttttagccgttaaccccacagccaatcaccacacgatccacactttttaaaatcacctcatttacatattggcaccattccatctataaggtatattatatagataga

SEQ ID NO: 99 - DNA, 35788 bp, Artificial Sequence
  Genome sequence of NG-756 virus
tctatctatataatataccttatagatggaatggtgccaatatgtaaatgaggtgattttaaaaagtgtggatcgtgtggtgattggctgtggggttaacggctaaaaggggcggtgcgaccgtgggaaaatgacgttttgtgggggtggagtttttttgcaagttgtcgcgggaaatgtgacgcataaaaaggcttttttctcacggaactacttagttttcccacggtatttaacaggaaatgaggtagttttgaccggatgcaagtgaaaattgttgattttcgcgcgaaaactgaatgaggaagtgtttttctgaataatgtggtatttatggcagggtggagtatttgttcagggccaggtagactttgacccattacgtggaggtttcgattaccgtgttttttacctgaatttccgcgtaccgtgtcaaagtcttctgtttttacgtaggtgtcagctgatcgctagggtatttatacctcagggtttgtgtcaagaggccactcttgagtgccagcgagaagagttttctcctctgcgccggcagtttaataataaaaaaatgagagatttgcgatttctgcctcaggaaataatctctgctgagactggaaatgaaatattggagcttgtggtgcacgccctgatgggagacgatccggagccacctgtgcagctttttgagcctcctacgcttcaggaactgtatgatttagaggtagagggatcggaggattctaatgaggaagctgtaaatggcttttttaccgattctatgcttttagctgctaatgaagggttagaattagatccgcctttggacacttttgatactccaggggtaattgtggaaagcggtacaggtgtaagaaaattacctgatttgagttccgtggactgtgatttgcactgctatgaagacgggtttcctccgagtgatgaggaggaccatgaaaaggagcagtccatgcagactgcagcgggtgagggagtgaaggctgccaatgttggttttcagttggattgcccggagcttcctggacatggctgtaagtcttgtgaatttcacaggaaaaatactggagtaaaggaactgttatgttcgctttgttatatgagaacgcactgccactttatttacagtaagtgtgtttaagttaaaatttaaaggaatatgctgtttttcacatgtatattgagtgtgagttttgtgcttcttattataggtcctgtgtctgatgctgatgaatcaccatctcctgattctactacctcacctcctgagattcaagcacctgttcctgtggacgtgcgcaagcccattcctgtgaagcttaagcctgggaaacgtccagcagtggaaaaacttgaggacttgttacagggtggggacggacctttggacttgagtacacggaaacgtccaagacaataagtgttccatatccgtgtttacttaaggtgacgtcaatatttgtgtgacagtgcaatgtaataaaaatatgttaactgttcactggtttttattgctttttgggcggggactcaggtatataagtagaagcagacctgtgtggttagctcataggagctggctttcatccatggaggtttgggccattttggaagaccttaggaagactaggcaactgttagagaacgcttcggacggagtctccggtttttggagattctggttcgctagtgaattagctagggtagtttttaggataaaacaggactataaacaagaatttgaaaagttgttggtagattgcccaggactttttgaagctcttaatttgggccatcaggttcactttaaagaaaaagttttatcagttttagacttttcaaccccaggtagaactgctgctgctgtggcttttcttacttttatattagataaatggatcccgcagactcatttcagcaggggatacgttttggatttcatagccacagcattgtggagaacatggaaggttcgcaagatgaggacaatcttaggttactggccagtgcagcctttgggtgtagcgggaatcctgaggcatccaccggtcatgccagcggttctggaggaggaacagcaagaggacaacccgagagccggcctggaccctccagtggaggaggcggagtagctgacttgtctcctgaactgcaacgggtgcttactggatctacgtccactggacgggataggggcgttaagagggagagggcatctagtggtactgatgctagatctgagttggctttaagtttaatgagtcgcagacgtcctgaaaccatttggtggcatgaggttcagaaagagggaagggatgaagtttctgtattgcaggagaaatattcactggaacaggtgaaaacatgttggttggagcctgaggatgattgggaggtggccattaaaaattatgccaagatagctttgaggcctgataaacagtataagattactagacggattaatatccggaatgcttgttacatatctggaaatggggctgaggtggtaatagatactcaagacaaggcagttattagatgctgcatgatggatatgtggcctggggtagtcggtatggaagcagtaacttttgtaaatgttaagtttaggggagatggttataatggaatagtgtttatggccaataccaaacttatattgcatggttgtagcttttttggtttcaacaatacctgtgtagatgcctggggacaggttagtgtacggggatgtagtttctatgcgtgttggattgccacagctggcagaaccaagagtcaattgtctctgaagaaatgcatatttcaaagatgtaacctgggcattctgaatgaaggcgaagcaagggtccgccactgcgcttctacagatactggatgttttattttgattaagggaaatgccagcgtaaagcataacatgatttgcggtgcttccgatgagaggccttatcaaatgctcacttgtgctggtgggcattgtaatatgctggctactgtgcatattgtttcccatcaacgcaaaaaatggcctgtttttgatcacaatgtgatgacgaagtgtaccatgcatgcaggtgggcgtagaggaatgtttatgccttaccagtgtaacatgaatcatgtgaaagtgttgttggaaccagatgccttttccagaatgagcctaacaggaatttttgacatgaacatgcaaatctggaagatcctgaggtatgatgatacgagatcgagggtacgcgcatgcgaatgcggaggcaagcatgccaggttccagccggtgtgtgtagatgtgactgaagatctcagaccggatcatttggttattgcccgcactggagcagagttcggatccagtggagaagaaactgactaaggtgagtattgggaaaactttggggtgggattttcagatggacagattgagtaaaaatttgttttttctgtcttgcagctgtcatgagtggaaacgcttcttttaaggggggagtcttcagcccttatctgacagggcgtctcccatcctgggcaggagttcgtcagaatgttatgggatctactgtggatggaagacccgtccaacccgccaattcttcaacgctgacctatgctactttaagttcttcacctttggacgcagctgcagctgccgccgccgcttctgttgccgctaacactgtgcttggaatgggttactatggaagcatcatggctaattccacttcctctaataacccttctaccctgactcaggacaagttacttgtccttttggcccagctggaggctttgacccaacgtctgggtgaactttctcagcaggtggtcgagttgcgagtacaaactgagtctgctgtcggcacggcaaagtctaaataaaaaaatcccagaatcaatgaataaataaacaagcttgttgttgatttaaaatcaagtgtttttatttcatttttcgcgcacggtatgccctagaccaccgatctctatcattgagaactcggtggattttttccaggatcctatagaggtgggattgaatgtttagatacatgggcattaggccgtctttggggtggagatagctccattgaagggattcatgctccggggtagtgttgtaaatcacccagtcataacaaggtcgcagtgcatggtgttgcacaatatcttttagaagtaggctgattgccacagataagcccttggtgtaggtgtttacaaaccggttgagctgggatgggtgcattcggggtgaaattatgtgcattttggattggatttttaagttggcaatattgccgccaagatcccgtcttgggttcatgttatgaaggaccaccaagacggtgtatccggtacatttaggaaatttatcgtgcagcttggatggaaaagcgtggaaaaatttggagacacccttgtgtcctccaagattttccatgcactcatccatgataatagcaatggggccgtgggcagcggcgcgggcaaacacgttccgtgggtctgacacatcatagttatgttcctgagttaaatcatcataagccattttaatgaatttggggcggagagtaccagattggggtatgaatgttccttcgggccccggagcatagttcccctcacagatttgcatttcccaagctttcagttccgagggtggaatcatgtccacctggggggctatgaaaaacaccgtttctggggcgggggtgattaattgtgatgatagcaaatttctgagcaattgagatttgccacatccggtggggccataaatgattccgattacgggttgcaggtggtagtttagggaacggcaactgccgtcttctcgaagcaagggggccacctcgttcatcatttcccttacatgcatattttcccgcaccaaatccattaggaggcgctctcctcctagtgatagaagttcttgtagtgaggaaaagtttttcagcggtttcagaccgtcagccatgggcattttggagagagtttgctgcaaaagttctagtctgttccacagttcagtgatgtgttctatggcatctcgatccagcagacctcctcgtttcgcgggtttggacggctcctggaatagggtatgagacgatgggcgtccagcgctgccagggttcggtccttccagggtctcagtgttcgagtcagggttgtttccgtcacagtgaaggggtgtgcgcctgcttgggcgcttgccagggtgcgcttcagactcatcctgctggtcgaaaacttctgtcgcttggcgccctgtatgtcggccaagtagcagtttaccatgagttcgtagttgagcgcctcggctgcgtggcctttggcgcggagcttacctttggaagttttcttgcataccgggcagtataggcatttcagcgcatacaacttgggcgcaaggaaaacggattctggggagtatgcatctgcgccgcaggaggcgcaaacagtttcacattccaccagccaggttaaatccggttcattggggtcaaaaacaagttttccgccatattttttgatgcgtttcttacctttggtctccatgagttcgtgtcctcgttgagtgacaaacaggctgtccgtgtccccgtagactgattttacaggcctcttctccagtggagtgcctcggtcttcttcgtacaggaactctgaccactctgatacaaaggcgcgcgtccaggccagcacaaaggaggctatgtgggaggggtagcgatcgttgtcaaccagggggtccaccttttccaaagtatgcaaacacatgtcaccctcttcaacatccaggaatgtgattggcttgtaggtgtatttcacgtgacctggggtccccgctgggggggtataaaagggggcggttctttgctcttcctcactgtcttccggatcgctgtccaggaacgtcagctgttggggtaggtattccctctcgaaggcgggcatgacctctgcactcaggttgtcagtttctaagaacgaggaggatttgatattgacagtgccggttgagatgcctttcatgaggttttcgtccatctggtcagaaaacacaatttttttattgtcaagtttggtggcaaatgatccatacagggcgttggataaaagtttggcaatggatcgcatggtttggttcttttccttgtccgcgcgctctttggcggcgatgttgagttggacatactcgcgtgccaggcacttccattcggggaagatagttgttaattcatctggcacgattctcacttgccaccctcgattatgcaaggtaattaaatccacactggtggccacctcgcctcgaaggggttcattggtccaacagagcctacctcctttcctagaacagaaagggggaagtgggtctagcataagttcatcgggagggtctgcatccatggtaaagattcccggaagtaaatccttatcaaaatagctgatgggagtggggtcatctaaggccatttgccattctcgagctgccagtgcgcgctcatatgggttaaggggactgccccatggcatgggatgggtgagtgcagaggcatacatgccacagatgtcatagacgtagatgggatcctcaaagatgcctatgtaggttggatagcatcgcccccctctgatacttgctcgcacatagtcatatagttcatgtgatggcgctagcagccccggacccaagttggtgcgattgggtttttctgttctgtagacgatctggcgaaagatggcgtgagaattggaagagatggtgggtctttgaaaaatgttgaaatgggcatgaggtagacctacagagtctctgacaaagtgggcataagattcttgaagcttggttaccagttcggcggtgacaagtacgtctagggcgcagtagtcaagtgtttcttgaatgatgtcataacctggttggtttttcttttcccacagttcgcggttgagaaggtattcttcgcgatccttccagtactcttctagcggaaacccgtctttgtctgcacggtaagatcctagcatgtagaactgattaactgccttgtaagggcagcagcccttctctacgggtagagagtatgcttgagcagcttttcgtagcgaagcgtgagtaagggcaaaggtgtctctgaccatgactttgaggaattggtatttgaagtcgatgtcgtcacaggctccctgttcccagagttggaagtctacccgtttcttgtaggcggggttgggcaaagcgaaagtaacatcattgaagagaatcttgccggccctgggcatgaaattgcgagtgatgcgaaaaggctgtggtacttccgctcggttattgataacctgggcagctaggacgatctcgtcgaaaccgttgatgttgtgtcctacgatgtataattctatgaaacgcggcgtgcctctgacgtgaggtagcttactgagctcatcaaaggttaggtctgtggggtcagataaggcgtagtgttcgagagcccattcgtgcaggtgaggattcgctttaaggaaggaggaccagaggtccactgccagtgctgtttgtaactggtcccggtactgacgaaaatgccgtccgactgccattttttctggggtgacgcaatagaaggtttgggggtcctgccgccagcgatcccacttgagttttatggcgaggtcataggcgatgttgacgagccgctggtctccagagagtttcatgaccagcatgaaggggattagctgcttgccaaaggaccccatccaggtgtaggtttccacatcgtaggtgagaaagagcctttctgtgcgaggatgagagccaatcgggaagaactggatctcctgccaccagttggaggaatggctgttgatgtgatggaagtagaactccctgcgacgcgccgagcattcatgcttgtgcttgtacagacggccgcagtagtcgcagcgttgcacgggttgtatctcgtgaatgagttgtacctggcttcccttgacgagaaatttcagtgggaagccgaggcctggcgattgtatctcgtgctttactatgttgtctgcatcggcctgttcatcttctgtctcgatggtggtcatgctgacgagccctcgcgggaggcaagtccagacctcggcgcggcaggggcggagctcgaggacgagagcgcgcaggctggagctgtccagggtcctgagacgctgcggactcaggttagtaggcagtgtcaggagattaacttgcatgatcttttggagggcgtgcgggaggttcagatagtacttgatctcaacgggtccgttggtggagatgtcgatggcttgcagggttccgtgtcccttgggcgctaccaccgtgcccttgtttttcattttggacggcggtggctctgttgcttcttgcatgtttagaagcggtgtcgagggcgcgcaccgggcggcaggggcggctcgggacccggcggcatggctggcagtggtacgtcggcgccgcgcgcgggtaggttctggtactgcgccctgagaagactcgcatgcgcgacgacgcggcggttgacatcctggatctgacgcctctgggtgaaagctaccggccccgtgagcttgaacctgaaagagagttcaacagaatcaatctcggtatcgttgacggcggcttgcctaaggatttcttgcacgtcaccagagttgtcctggtaggcgatctccgccatgaactgctcgatctcttcctcttgaagatctccgcggcccgctctctcgacggtggccgcgaggtcgttggagatgcgcccaatgagttgagagaatgcattcatgcccgcctcgttccagacgcggctgtagaccacggcccccacgggatctctcgcgcgcatgaccacctgggcgaggttgagctccacgtggcgggtgaagaccgcatagttgcataggcgctggaaaaggtagttgagtgtggtggcgatgtgctcggtgacgaagaaatacatgatccatcgtctcagcggcatctcgctgacatcgcccagagcttccaagcgctccatggcctcgtagaagtccacggcaaaattaaaaaactgggagtttcgcgcggacacggtcaactcctcttccagaagacggataagttcggcgatggtggtgcgcacctcgcgctcgaaagcccctgggatttcttcctcaatctcttcttcttccactaacatctcttcctcttcaggtggggctgcaggaggagggggaacgcggcgacgccggcggcgcacgggcagacggtcgatgaatctttcaatgacctctccgcggcggcggcgcatggtttcagtgacggcgcggccgttctcgcgcggtcgcagagtaaaaacaccgccgcgcatctccttaaagtggtgactgggaggttctccgtttgggagggagagggcgctgattatacattttattaattggcccgtagggactgcacgcagagatctgatcgtgtcaagatccacgggatctgaaaacctttcgacgaaagcgtctaaccagtcacagtcacaaggtaggctgagtacggcttcttgtgggcgggggtggttatgtgttcggtctgggtcttctgtttcttcttcatctcgggaaggtgagacgatgctgctggtgatgaaattaaagtaggcagttctaagacggcggatggtggcgaggagcaccaggtctttgggtccggcttgctggatacgcaggcgattggccattccccaagcattatcctgacatctagcaagatctttgtagtagtcttgcatgagccgttctacgggcacttcttcctcacccgttctgccatgcatacgtgtgagtccaaatccgcgcattggttgtaccagtgccaagtcagctacgactctttcggcgaggatggcttgctgtacttgggtaagggtggcttgaaagtcatcaaaatccacaaagcggtggtaagctcctgtattaatggtgtaagcacagttggccatgactgaccagttaactgtctggtgaccagggcgcacgagctcggtgtatttaaggcgcgaataggcgcgggtgtcaaagatgtaatcgttgcaggtgcgcaccagatactggtaccctataagaaaatgcggcggtggttggcggtagagaggccatcgttctgtagctggagcgccaggggcgaggtcttccaacataaggcggtgatagccgtagatgtacctggacatccaggtgattcctgcggcggtagtagaagcccgaggaaactcgcgtacgcggttccaaatgttgcgtagcggcatgaagtagttcattgtaggcacggtttgaccagtgaggcgcgcgcagtcattgatgctctatagacacggagaaaatgaaagcgttcagcgactcgactccgtagcctggaggaacgtgaacgggttgggtcgcggtgtaccccggttcgagacttgtactcgagccggccggagccgcggctaacgtggtattggcactcccgtctcgacccagcctacaaaaatccaggatacggaatcgagtcgttttgctggtttccgaatggcagggaagtgagtcctattttttttttttgccgctcagatgcatcccgtgctgcgacagatgcgcccccaacaacagcccccctcgcagcagcagcagcagcaatcacaaaaggctgtccctgcaactactgcaactgccgccgtgagcggtgcgggacagcccgcctatgatctggacttggaagagggcgaaggactggcacgtctaggtgcgccttcacccgagcggcatccgcgagttcaactgaaaaaagattctcgcgaggcgtatgtgccccaacagaacctatttagagacagaagcggcgaggagccggaggagatgcgagcttcccgctttaacgcgggtcgtgagctgcgtcacggtttggaccgaagacgagtgttgcgggacgaggatttcgaagttgatgaaatgacagggatcagtcctgccagggcacacgtggctgcagccaaccttgtatcggcttacgagcagacagtaaaggaagagcgtaacttccaaaagtcttttaataatcatgtgcgaaccctgattgcccgcgaagaagttacccttggtttgatgcatttgtgggatttgatggaagctatcattcagaaccctactagcaaacctctgaccgcccagctgtttctggtggtgcaacacagcagagacaatgaggctttcagagaggcgctgctgaacatcaccgaacccgaggggagatggttgtatgatcttatcaacattctacagagtatcatagtgcaggagcggagcctgggcctggccgagaaggtggctgccatcaattactcggttttgagcttgggaaaatattacgctcgcaaaatctacaagactccatacgttcccatagacaaggaggtgaagatagatgggttctacatgcgcatgacgctcaaggtcttgaccctgagcgatgatcttggggtgtatcgcaatgacagaatgcatcgcgcggttagcgccagcaggaggcgcgagttaagcgacagggaactgatgcacagtttgcaaagagctctgactggagctggaaccgagggtgagaattacttcgacatgggagctgacttgcagtggcagcctagtcgcagggctctgagcgccgcgacggcaggatgtgagcttccttacatagaagaggcggatgaaggcgaggaggaagagggcgagtacttggaagactgatggcacaacccgtgttttttgctagatggaacagcaagcaccggatcccgcaatgcgggcggcgctgcagagccagccgtccggcattaactcctcggacgattggacccaggccatgcaacgtatcatggcgttgacgactcgcaaccccgaagcctttagacagcaaccccaggccaaccgtctatcggccatcatggaagctgtagtgccttcccgctctaatcccactcatgagaaggtcctggccatcgtgaacgcgttggtggagaacaaagctattcgtccagatgaggccggactggtatacaacgctctcttagaacgcgtggctcgctacaacagtagcaatgtgcaaaccaatttggaccgtatgataacagatgtacgcgaagccgtgtctcagcgcgaaaggttccagcgtgatgccaacctgggttcgctggtggcgttaaatgctttcttgagtactcagcctgctaatgtgccgcgtggtcaacaggattatactaactttttaagtgctttgagactgatggtatcagaagtacctcagagcgaagtgtatcagtccggtcctgattacttctttcagactagcagacagggcttgcagacggtaaatctgagccaagcttttaaaaaccttaaaggtttgtggggagtgcatgccccggtaggagaaagagcaaccgtgtctagcttgttaactccgaactcccgcctattattactgttggtagctcctttcaccgacagcggtagcatcgaccgtaattcctatttgggttacctactaaacctgtatcgcgaagccatagggcaaagtcaggtggacgagcagacctatcaagaaattacccaagtcagtcgcgctttgggacaggaagacactggcagtttggaagccactctgaacttcttgcttaccaatcggtctcaaaagatccctcctcaatatgctcttactgcggaggaggagaggatccttagatatgtgcagcagagcgtgggattgtttctgatgcaagagggggcaactccgactgcagcactggacatgacagcgcgaaatatggagcccagcatgtatgccagtaaccgacctttcattaacaaactgctggactacttgcacagagctgccgctatgaactctgattatttcaccaatgccatcttaaacccgcactggctgcccccacctggtttctacacgggcgaatatgacatgcccgaccctaatgacggatttctgtgggacgacgtggacagcgatgttttttcacctctttctgatcatcgcacgtggaaaaaggaaggcggcgatagaatgcattcttctgcatcgctgtccggggtcatgggtgctaccgcggctgagcccgagtctgcaagtccttttcctagtctacccttttctctacacagtgtacgtagcagcgaagtgggtagaataagtcgcccgagtttaatgggcgaagaggagtatctaaacgattccttgctcagaccggcaagagaaaaaaatttcccaaacaatggaatagaaagtttggtggataaaatgagtagatggaagacttatgctcaggatcacagagacgagcctgggatcatggggattacaagtagagcgagccgtagacgccagcgccatgacagacagaggggtcttgtgtgggacgatgaggattcggccgatgatagcagcgtgctggacttgggtgggagaggaaggggcaacccgtttgctcatttgcgccctcgcttgggtggtatgttgtaaaaaaaaataaaaaaaaaactcaccaaggccatggcgacgagcgtacgttcgttcttctttattatctgtgtctagtataatgaggcgagtcgtgctaggcggagcggtggtgtatccggagggtcctcctccttcgtacgagagcgtgatgcagcagcagcaggcgacggcggtgatgcaatccccactggaggctccctttgtgcctccgcgatacctggcacctacggagggcagaaacagcattcgttattcggaactggcacctcagtacgataccaccaggttgtatctggtggacaacaagtcggcggacattgcttctctgaactatcagaatgaccacagcaacttcttgaccacggtggtgcaaaacaatgactttacccctacggaagccagcacccagaccattaactttgatgaacgatcgcggtggggcggtcagctaaagaccatcatgcatactaacatgccaaacgtgaacgagtatatgtttagtaacaagttcaaagcgcgtgtgatggtgtccagaaaacctcccgacggtgctgcagttggggatacttatgatcacaagcaggatattttgaaatatgagtggttcgagtttactttgccagaaggcaacttttcagttactatgactattgatttgatgaacaatgccatcatagataattacttgaaagtgggtagacagaatggagtgcttgaaagtgacattggtgttaagttcgacaccaggaacttcaagctgggatgggatcccgaaaccaagttgatcatgcctggagtgtatacgtatgaagccttccatcctgacattgtcttactgcctggctgcggagtggattttaccgagagtcgtttgagcaaccttcttggtatcagaaaaaaacagccatttcaagagggttttaagattttgtatgaagatttagaaggtggtaatattccggccctcttggatgtagatgcctatgagaacagtaagaaagaacaaaaagccaaaatagaagctgctacagctgctgcagaagctaaggcaaacatagttgccagcgactctacaagggttgctaacgctggagaggtcagaggagacaattttgcgccaacacctgttccgactgcagaatcattattggccgatgtgtctgaaggaacggacgtgaaactcactattcaacctgtagaaaaagatagtaagaatagaagctataatgtgttggaagacaaaatcaacacagcctatcgcagttggtatctttcgtacaattatggcgatcccgaaaaaggagtgcgttcctggacattgctcaccacctcagatgtcacctgcggagcagagcaggtctactggtcgcttccagacatgatgaaggatcctgtcactttccgctccactagacaagtcagtaactaccctgtggtgggtgcagagcttatgcccgtcttctcaaagagcttctacaacgaacaagctgtgtactcccagcagctccgccagtccacctcgcttacgcacgtcttcaaccgctttcctgagaaccagattttaatccgtccgccggcgcccaccattaccaccgtcagtgaaaacgttcctgctctcacagatcacgggaccctgccgttgcgcagcagtatccggggagtccaacgtgtgaccgttactgacgccagacgccgcacctgtccctacgtgtacaaggcactgggcatagtcgcaccgcgcgtcctttcaagccgcactttctaaaaaaaaaaaaaatgtccattcttatctcgcccagtaataacaccggttggggtctgcgcgctccaagcaagatgtacggaggcgcacgcaaacgttctacccaacatcctgtccgtgttcgcggacattttcgcgctccatggggcgccctcaagggccgcactcgcgttcgaaccaccgtcgatgatgtaatcgatcaggtggttgccgacgcccgtaattatactcctactgcgcctacatctactgtggatgcagttattgacagtgtagtggctgacgctcgcaactatgctcgacgtaagagccggcgaaggcgcattgccagacgccaccgagctaccactgccatgcgagccgcaagagctctgctacgaagagctagacgcgtggggcgaagagccatgcttagggcggccagacgtgcagcttcgggcgccagcgccggcaggtcccgcaggcaagcagccgctgtcgcagcggcgactattgccgacatggcccaatcgcgaagaggcaatgtatactgggtgcgtgacgctgccaccggtcaacgtgtacccgtgcgcacccgtccccctcgcacttagaagatactgagcagtctccgatgttgtgtcccagcggcgaggatgtccaagcgcaaatacaaggaagaaatgctgcaggttatcgcacctgaagtctacggccaaccgttgaaggatgaaaaaaaaccccgcaaaatcaagcgggttaaaaaggacaaaaaagaagaggaagatggcgatgatgggctggcggagtttgtgcgcgagtttgccccacggcgacgcgtgcaatggcgtgggcgcaaagttcgacatgtgttgagacctggaacttcggtggtctttacacccggcgagcgttcaagcgctacttttaagcgttcctatgatgaggtgtacggggatgatgatattcttgagcaggcggctgaccgattaggcgagtttgcttatggcaagcgtagtagaataacttccaaggatgagacagtgtcgatacccttggatcatggaaatcccacccctagtcttaaaccggtcactttgcagcaagtgttacccgtaactccgcgaacaggtgttaaacgcgaaggtgaagatttgtatcccactatgcaactgatggtacccaaacgccagaagttggaggacgttttggagaaagtaaaagtggatccagatattcaacctgaggttaaagtgagacccattaagcaggtagcgcctggtctgggggtacaaactgtagacattaagattcccactgaaagtatggaagtgcaaactgaacccgcaaagcctactgccacctccactgaagtgcaaacggatccatggatgcccatgcctattacaactgacgccgccggtcccactcgaagatcccgacgaaagtacggtccagcaagtctgttgatgcccaattatgttgtacacccatctattattcctactcctggttaccgaggcactcgctactatcgcagccgaaacagtacctcccgccgtcgccgcaagacacctgcaaatcgcagtcgtcgccgtagacgcacaagcaaaccgactcccggcgccctggtgcggcaagtgtaccgcaatggtagtgcggaacctttgacactgccgcgtgcgcgttaccatccgagtatcatcacttaatcaatgttgccgctgcctccttgcagatatggccctcacttgtcgccttcgcgttcccatcactggttaccgaggaagaaactcgcgccgtagaagagggatgttgggacgcggaatgcgacgctacaggcgacggcgtgctatccgcaagcaattgcggggtggttttttaccagccttaattccaattatcgctgctgcaattggcgcgataccaggcatagcttccgtggcggttcaggcctcgcaacgacattgacattggaaaaaaacgtataaataaaaaaaaaaaaatacaatggactctgacactcctggtcctgtgactatgttttcttagagatggaagacatcaatttttcatccttggctccgcgacacggcacgaagccgtacatgggcacctggagcgacatcggcacgagccaactgaacgggggcgccttcaattggagcagtatctggagcgggcttaaaaattttggctcaaccataaaaacatacgggaacaaagcttggaacagcagtacaggacaggcgcttagaaataaacttaaagaccagaacttccaacaaaaagtagtcgatgggatagcttccggcatcaatggagtggtagatttggctaaccaggctgtgcagaaaaagataaacagtcgtttggacccgccgccagcaaccccaggtgaaatgcaagtggaggaagaaattcctccgccagaaaaacgaggcgacaagcgtccgcgtcccgatttggaagagacgctggtgacgcgcgtagatgaaccgccttcttatgaggaagcaacgaagcttggaatgcccaccactagaccgatagccccaatggccaccggggtgatgaaaccttctcagttgcatcgacccgtcaccttggatttgccccctccccctgctgctactgctgtacccgcttctaagcctgtcgctgccccgaaaccagtcgccgtagccaggtcacgtcccgggggcgctcctcgtccaaatgcgcactggcaaaatactctgaacagcatcgtgggtctaggcgtgcaaagtgtaaaacgccgtcgctgcttttaattaaatatggagtagcgcttaacttgcctatctgtgtatatgtgtcattacacgccgtcacagcagcagaggaaaaaaggaagaggtcgtgcgtcgacgctgagttactttcaagatggccaccccatcgatgctgccccaatgggcatacatgcacatcgccggacaggatgcttcggagtacctgagtccgggtctggtgcagttcgcccgcgccacagacacctacttcaatctgggaaataagtttagaaatcccaccgtagcgccgacccacgatgtgaccaccgaccgtagccagcggctcatgttgcgcttcgtgcccgttgaccgggaggacaatacatactcttacaaagtgcggtacaccctggccgtgggcgacaacagagtgctggatatggccagcacgttctttgacattaggggtgtgttggacagaggtcccagtttcaaaccctattctggtacggcttacaactccctggctcctaaaggcgctccaaatacatctcagtggattgcagaaggtgtaaaaaatacaactggtgaggaacacgtaacagaagaggaaaccaatactactacttacacttttggcaatgctcctgtaaaagctgaagctgaaattacaaaagaaggactcccagtaggtttggaagtttcagatgaagaaagtaaaccgatttatgctgataaaacatatcagccagaacctcagctgggagatgaaacttggactgaccttgatggaaaaaccgaaaagtatggaggcagggctctcaaacccgatactaagatgaaaccatgctacgggtcctttgccaaacctactaatgtgaaaggcggtcaggcaaaacaaaaaacaacggagcagccaaatcagaaagtcgaatatgatatcgacatggagttttttgatgcggcatcgcagaaaacaaacttaagtcctaaaattgtcatgtatgcagaaaatgtaaatttggaaactccagacactcatgtagtgtacaaacctggaacagaagacacaagttccgaagctaatttgggacaacaatctatgcccaacagacccaactacattggcttcagagataactttattggacttatgtactataacagtactggtaacatgggggtgctggctggtcaagcgtctcagttaaatgcagtggttgacttgcaggacagaaacacagaactttcttaccaactcttgcttgactctctgggcgacagaaccagatactttagcatgtggaatcaggctgtggacagttatgatcctgatgtacgtgttattgaaaatcatggtgtggaagatgaacttcccaactactgttttccactggacggcataggtgttccaacaaccagttacaaatcaatagttccaaatggagacaatgcgcctaattggaaggaacctgaagtaaatggaacaagtgagatcggacagggtaatttgtttgccatggaaattaaccttcaagccaatctatggcgaagtttcctttattccaatgtggctctatatctcccagactcgtacaaatacaccccgtccaatgtcactcttccagaaaacaaaaacacctacgactacatgaacgggcgggtggtgccgccatctctagtagacacctatgtgaacattggtgccaggtggtctctggatgccatggacaatgtcaacccattcaaccaccaccgtaacgctggcttgcgttaccgatccatgcttctgggtaacggacgttatgtgcctttccacatacaagtgcctcaaaaattcttcgctgttaaaaacctgctgcttctcccaggctcctacacttatgagtggaactttaggaaggatgtgaacatggttctacagagttccctcggtaacgacctgcgggtagatggcgccagcatcagtttcacgagcatcaacctctatgctacttttttccccatggctcacaacaccgcttccacccttgaagccatgctgcggaatgacaccaatgatcagtcattcaacgactacctatctgcagctaacatgctctaccccattcctgccaatgcaaccaatattcccatttccattccttctcgcaactgggcggctttcagaggctggtcatttaccagactgaaaaccaaagaaactccctctttggggtctggatttgacccctactttgtctattctggttctattccctacctggatggtaccttctacctgaaccacacttttaagaaggtttccatcatgtttgactcttcagtgagctggcctggaaatgacaggttactatctcctaacgaatttgaaataaagcgcactgtggatggcgaaggctacaacgtagcccaatgcaacatgaccaaagactggttcttggtacagatgctcgccaactacaacatcggctatcagggcttctacattccagaaggatacaaagatcgcatgtattcatttttcagaaacttccagcccatgagcaggcaggtggttgatgaggtcaattacaaagacttcaaggccgtcgccataccctaccaacacaacaactctggctttgtgggttacatggctccgaccatgcgccaaggtcaaccctatcccgctaactatccctatccactcattggaacaactgccgtaaatagtgttacgcagaaaaagttcttgtgtgacagaaccatgtggcgcataccgttctcgagcaacttcatgtctatgggggcccttacagacttgggacagaatatgctctatgccaactcagctcatgctctggacatgacctttgaggtggatcccatggatgagcccaccctgctttatcttctcttcgaagttttcgacgtggtcagagtgcatcagccacaccgcggcatcatcgaggcagtctacctgcgtacaccgttctcggccggtaacgctaccacgtaagaagcttcttgcttcttgcaaatagcagctgcaaccatggcctgcggatcccaaaacggctccagcgagcaagagctcagagccattgtccaagacctgggttgcggaccctattttttgggaacctacgataagcgcttcccggggttcatggcccccgataagctcgcctgtgccattgtaaatacggccggacgtgagacggggggagagcactggttggctttcggttggaacccacgttctaacacctgctacctttttgatccttttggattctcggatgatcgtctcaaacagatttaccagtttgaatatgagggtctcctgcgccgcagcgctcttgctaccaaggaccgctgtattacgctggaaaaatctacccagaccgtgcagggtccccgttctgccgcctgcggacttttctgctgcatgttccttcacgcctttgtgcactggcctgaccgtcccatggacggaaaccccaccatgaaattgctaactggagtgccaaacaacatgcttcattctcctaaagtccagcccaccctgtgtgacaatcaaaaagcactctaccattttcttaatacccattcgccttattttcgctcccatcgtacacacatcgaaagggccactgcgttcgaccgtatggatgttcaataatgactcatgtaaacaacgtgttcaataaacatcactttatttttttacatgtatcaaggctctgcattacttatttatttacaagtcgaatgggttctgacgagaatcagaatgacccgcaggcagtgatacgttgcggaactgatacttgggttgccacttgaattcgggaatcaccaacttgggaaccggtatatcgggcaggatgtcactccacagctttctggtcagctgcaaagctccaagcaggtcaggagccgaaatcttgaaatcacaattaggaccagtgctttgagcgcgagagttgcggtacaccggattgcagcactgaaacaccatcagcgacggatgtctcacgcttgccagcacggtgggatctgcaatcatgcccacatccagatcttcagcattggcaatgctgaacggggtcatcttgcaggtctgcctacccatggcgggcacccaattaggcttgtggttgcaatcgcagtgcagggggatcagtatcatcttggcctgatcctgtctgattcctggatacacggctctcatgaaagcatcatattgcttgaaagcctgctgggctttactaccctcggtataaaacatcccgcaggacctgctcgaaaactggttagctgcacagccggcatcattcacacagcagcgggcgtcattgttagctatttgcaccacacttctgccccagcggttttgggtgattttggttcgctcgggattctcctttaaggctcgttgtccgttctcgctggccacatccatctcgataatctgctccttctgaatcataatattgccatgcaggcacttcagcttgccctcataatcattgcagccatgaggccacaacgcacagcctgtacattcccaattatggtgggcgatctgagaaaaagaatgtatcattccctgcagaaatcttcccatcatcgtgctcagtgtcttgtgactagtgaaagttaactggatgcctcggtgctcctcgtttacgtactggtgacagatgcgcttgtattgttcgtgttgctcaggcattagtttaaaagaggttctaagttcgttatccagcctgtacttctccatcagcagacacatcacttccatgcctttctcccaagcagacaccaggggcaagctaatcggattcttaacagtgcaggcagcagctcctttagccagagggtcatctttagcgatcttctcaatgcttcttttgccatccttctcaacgatgcgcacgggcgggtagctgaaacccactgctacaagttgcgcctcttctctttcttcttcgctgtcttgactgatgtcttgcatggggatatgtttggtcttccttggcttctttttggggggtatcggaggaggaggactgtcgctccgttccggagacagggaggattgtgacgtttcgctcaccattaccaactgactgtcggtagaagaacctgaccccacacggcgacaggtgtttctcttcgggggcagaggtggaggcgattgcgaagggctgcggtccgacctggaaggcggatgactggcagaaccccttccgcgttcgggggtgtgctccctgtggcggtcgcttaactgatttccttcgcggctggccattgtgttctcctaggcagagaaacaacagacatggaaactcagccattgctgtcaacatcgccacgagtgccatcacatctcgtcctcagcgacgaggaaaaggagcagagcttaagcattccaccgcccagtcctgccaccacctctaccctagaagataaggaggtcgacgcatctcatgacatgcagaataaaaaagcgaaagagtctgagacagacatcgagcaagacccgggctatgtgacaccggtggaacacgaggaagagttgaaacgctttctagagagagaggatgaaaactgcccaaaacaacgagcagataactatcaccaagatgctggaaatagggatcagaacaccgactacctcatagggcttgacggggaagacgcgctccttaaacatctagcaagacagtcgctcatagtcaaggatgcattattggacagaactgaagtgcccatcagtgtggaagagctcagccgcgcctacgagcttaacctcttttcacctcgtactccccccaaacgtcagccaaacggcacctgcgagccaaatcctcgcttaaacttttatccagcttttgctgtgccagaagtactggctacctatcacatcttttttaaaaatcaaaaaattccagtctcctgccgcgctaatcgcacccgcgccgatgccctactcaatctgggacctggttcacgcttacctgatatagcttccttggaagaggttccaaagatcttcgagggtctgggcaataatgagactcgggccgcaaatgctctgcaaaagggagaaaatggcatggatgagcatcacagcgttctggtggaattggaaggcgataatgccagactcgcagtactcaagcgaagcatcgaggtcacacacttcgcatatcccgctgtcaacctgccccctaaagtcatgacggcggtcatggaccagttactcattaagcgcgcaagtcccctttcagaagacatgcatgacccagatgcctgtgatgagggtaaaccagtggtcagtgatgagcagctaacccgatggctgggcaccgactctcccagggatttggaagagcgtcgcaagcttatgatggccgtggtgctggttaccgtagaactagagtgtctccgacgtttctttaccgattcagaaaccttgcgcaaactcgaagagaatctgcactacacttttagacacggctttgtgcggcaggcatgcaagatatctaacgtggaactcaccaacctggtttcctacatgggtattctgcatgagaatcgcctaggacaaagcgtgctgcacagcaccctgaagggggaagcccgccgtgattacatccgcgattgtgtctatctgtacctgtgccacacgtggcaaaccggcatgggtgtatggcagcaatgtttagaagaacagaacttgaaagagcttgacaagctcttacagaaatctcttaaggttctgtggacagggttcgacgagcgcaccgtcgcttccgacctggcagacctcatcttcccagagcgtctcagggttactttgcgaaacggattgcctgactttatgagccagagcatgcttaacaattttcgctctttcatcctggaacgctccggtatcctgcccgccacctgctgcgcactgccctccgactttgtgcctctcacctaccgcgagtgccccccgccgctatggagtcactgctacctgttccgtctggccaactatctctcctaccactcggatgtgatcgaggatgtgagcggagacggcttgctggagtgtcactgccgctgcaatctgtgcacgccccaccggtccctagcttgcaacccccagttgatgagcgaaacccagataataggcacctttgaattgcaaggccccagcagccaaggcgatgggtcttctcctgggcaaagtttaaaactgaccccgggactgtggacctccgcctacttgcgcaagtttgctccggaagattaccacccctatgaaatcaagttctatgaggaccaatcacagcctccaaaggccgaactttcggcctgcgtcatcacccagggggcaattctggcccaattgcaagccatccaaaaatcccgccaagaatttctactgaaaaagggtaagggggtctaccttgacccccagaccggcgaggaactcaacacaaggttccctcaggatgtcccaacgacgagaaaacaagaagttgaaggtgcagccgccgcccccagaagatatggaggaagattgggacagtcaggcagaggaggcggaggaggacagtctggaggacagtctggaggaagacagtttggaggaggaaaacgaggaggcagaggaggtggaagaagtaaccgccgacaaacagttatcctcggctgcggagacaagcaacagcgctaccatctccgctccgagtcgaggaacccggcggcgtcccagcagtagatgggacgagaccggacgcttcccgaacccaaccagcgcttccaagaccggtaagaaggatcggcagggatacaagtcctggcgggggcataagaatgccatcatctcctgcttgcatgagtgcgggggcaacatatccttcacgcggcgctacttgctattccaccatggggtgaactttccgcgcaatgttttgcattactaccgtcacctccacagcccctactatagccagcaaatcccggcagtctcgacagataaagacagcggcggcgacctccaacagaaaaccagcagcggcagttagaaaatacacaacaagtgcagcaacaggaggattaaagattacagccaacgagccagcgcaaacccgagagttaagaaatcggatctttccaaccctgtatgccatcttccagcagagtcggggtcaagagcaggaactgaaaataaaaaaccgatctctgcgttcgctcaccagaagttgtttgtatcacaagagcgaagatcaacttcagcgcactctcgaggacgccgaggctctcttcaacaagtactgcgcgctgactcttaaagagtaggcagcgaccgcgcttattcaaaaaaggcgggaattacatcatcctcgacatgagtaaagaaattcccacgccttacatgtggagttatcaaccccaaatgggattggcggcaggcgcctcccaggactactccacccgcatgaattggctcagcgccgggccttctatgatttctcgagttaatgatatacgcgcctaccgaaaccaaatacttttggaacagtcagctcttaccaccacgccccgccaacaccttaatcccagaaattggcccgccgccctagtgtaccaggaaagtcccgctcccaccactgtattacttcctcgagacgcccaggccgaagtccaaatgactaatgcaggtgcgcagttagctggcggctccaccctatgtcgtcacaggcctcggcataatataaaacgcctgatgatcagaggccgaggtatccagctcaacgacgagtcggtgagctctccgcttggtctacgaccagacggaatctttcagattgccggctgcgggagatcttccttcacccctcgtcaggctgttctgactttggaaagttcgtcttcgcaaccccgctcgggcggaatcgggaccgttcaatttgtggaggagtttactccctctgtctacttcaaccccttctccggatctcctgggcattacccggacgagttcataccgaacttcgacgcgattagcgagtcagtggacggctacgattgatgtctggtgacgcggctgagctatctcggctgcgacatctagaccactgccgccgctttcgctgctttgcccgggaactcattgagttcatctacttcgaactccccaaggatcaccctcaaggtccggcccacggagtgcggatttctatcgaaggcaaaatagactctcgcctgcaacgaattttctcccagcggcccgtgctgatcgagcgagaccagggaaacaccacggtttccatctactgcatttgtaatcaccccggattgcatgaaagcctttgctgtcttatgtgtactgagtttaataaaaactgaattaagactctcctacggactgccgcttcttcaacccggattttacaaccagaagaacgaaacttttcctgtcgtccaggactctgttaacttcacctttcctactcacaaactagaagctcaacgactacaccgcttttccagaagcattttccctactaatactactttcaaaaccggaggtgagctccaaggtcttcctacagaaaacccttgggtggaagcgggccttgtagtgctaggaattcttgcgggtgggcttgtgattattctttgctacctatacacaccttgcttcactttcttagtggtgttgtggtattggtttaaaaaatggggcccatactagtcttgcttgttttactttcgcttttggaaccgggttctgccaattacgatccatgtctagacttcgacccagaaaactgcacacttacttttgcacccgacacaagccgcatctgtggagttcatcgcctctcttacgaacttggcccccaacgacaaaaatttacctgcatggtgggaatcaaccccatagttatcacccagcaaagtggagatactaagggttgcattcactgctcctgcgattccatcgagtgcacctacaccctgctgaagaccctatgcggcctaagagacctgctaccaatgaattaaaaaatgattaataaaaaatcacttacttgaaatcagcaataaggtctctgttgaaattttctcccagcagcacctcacttccctcttcccaactctggtattctaaaccccgttcagcggcatactttctccatactttaaaggggatgtcaaattttagctcctctcctgtacccacaatcttcatgtctttcttcccagatgaccaagagagtccggctcagtgactccttcaaccctgtctacccctatgaagatgaaagcacctcccaacacccctttataaacccagggtttatttccccaaatggcttcacacaaagcccaaacggagttcttactttaaaatgtttaaccccactaacaaccacaggcggatctctacagctaaaagtgggagggggacttacagtggatgacaccaacggttttttgaaagaaaacataagtgccaccacaccactcgttaagactggtcactctataggtttaccactaggagccggattgggaacgaatgaaaataaactttgtatcaaattaggacaaggacttacattcaattcaaacaacatttgcattgatgacaatattaacaccttatggacaggagtcaaccccaccgaagccaactgtcaaatcatgaactccagtgaatctaatgattgcaaattaattctaacactagttaaaactggagcactagtcactgcatttgtttatgttataggagtatctaacaattttaatatgctaactacacacagaaatataaattttactgcagagctgtttttcgattctactggtaatttactaactagactctcatccctcaaaactccacttaatcataaatcaggacaaaacatggctactggtgccattactaatgctaaaggtttcatgcccagcacgactgcctatcctttcaatgataattctagagaaaaagaaaactacatttacggaacttgttactacacagctagtgatcgcactgcttttcccattgacatatctgtcatgcttaaccgaagagcaataaatgacgagacatcatattgtattcgtataacttggtcctggaacacaggagatgccccagaggtgcaaacctctgctacaaccctagtcacctccccatttaccttttactacatcagagaagacgactgacaaataaagtttgcgatcgccaggcccaccatggactggacctggcgcatcctgttcttggtggcagctgctacgggagctcattccaactgggtgaatgtaataagtgatttgaaaaaaattgaagatcttattcaatctatgcatattgatgctactttatatacggaaagtgatgttcaccccagttgcaaagtaacagcaatgaagtgctttctcttggagttacaagttatttcacttgagtccggagatgcaagtattcatgatacagtagaaaatctgatcatcctagcaaacaacagtttgtcttctaatgggaatgtaacagaatctggatgcaaagaatgtgaggaactggaggaaaaaaatattaaagaatttttgcagagttttgtacatattgtccaaatgttcatcaacacttctggaagcggagagggcagaggaagtctgctaacatgcggtgacgtcgaggagaatcctggacctgccttgacctttgctttactggtggccctcctggtgctcagctgcaagtcaagctgctctgtgggctgtgatctgcctcaaacccacagcctgggtagcaggaggaccttgatgctcctggcacagatgaggagaatctctcttttctcctgcttgaaggacagacatgactttggatttccccaggaggagtttggcaaccagttccaaaaggctgaaaccatccctgtcctccatgagatgatccagcagatcttcaatctcttcagcacaaaggactcatctgctgcttgggatgagaccctcctagacaaattctacactgaactctaccagcagctgaatgacctggaagcctgtgtgatacagggggtgggggtgacagagactcccctgatgaaggaggactccattctggctgtgaggaaatacttccaaagaatcactctctatctgaaagagaagaaatacagcccttgtgcctgggaggttgtcagagcagaaatcatgagatctttttctttgtcaacaaacttgcaagaaagtttaagaagtaaggaaggaagcggacagtgtactaattatgctctcttgaaattggctggagatgttgagagcaaccctggacctaagaaaagtggtgttcttttcctcttgggcatcatcttgctggttctgattggagtgcaaggaaccccagtagtgagaaagggtcgctgttcctgcatcagcaccaaccaagggactatccacctacaatccttgaaagaccttaaacaatttgccccaagcccttcctgcgagaaaattgaaatcattgctacactgaagaatggagttcaaacatgtctaaacccagattcagcagatgtgaaggaactgattaaaaagtgggagaaacaggtcagccaaaagaaaaagcaaaagaatgggaaaaaacatcaaaaaaagaaagttctgaaagttcgaaaatctcaacgttctcgtcaaaagaagactacaggaagcggagtgaaacagactttgaattttgaccttctcaagttggcgggagacgtggagtccaaccctggacctatgtgtcaccagcagttggtcatctcttggttttccctggtttttctggcatctcccctcgtggccatatgggaactgaagaaagatgtttatgtcgtagaattggattggtatccggatgcccctggagaaatggtggtcctcacctgtgacacccctgaagaagatggtatcacctggaccttggaccagagcagtgaggtcttaggctctggcaaaaccctgaccatccaagtcaaagagtttggagatgctggccagtacacctgtcacaaaggaggcgaggttctaagccattcgctcctgctgcttcacaaaaaggaagatggaatttggtccactgatattttaaaggaccagaaagaacccaaaaataagacctttctaagatgcgaggccaagaattattctggacgtttcacctgctggtggctgacgacaatcagtactgatttgacattcagtgtcaaaagcagcagaggctcttctgacccccaaggggtgacgtgcggagctgctacactctctgcagagagagtcagaggggacaacaaggagtatgagtactcagtggagtgccaggaggacagtgcctgcccagctgctgaggagagtctgcccattgaggtcatggtggatgccgttcacaagctcaagtatgaaaactacaccagcagcttcttcatcagggacatcatcaaacctgacccacccaagaacttgcagctgaagccattaaagaattctcggcaggtggaggtcagctgggagtaccctgacacctggagtactccacattcctacttctccctgacattctgcgttcaggtccagggcaagagcaagagagaaaagaaagatagagtcttcacggacaagacctcagccacggtcatctgccgcaaaaatgccagcattagcgtgcgggcccaggaccgctactatagctcatcttggagcgaatgggcatctgtgccctgcagtggagggggcggcagcgggggaggcggcagcggcggcgggggatcgagaaacctccccgtggccactccagacccaggaatgttcccatgccttcaccactcccaaaacctgctgagggccgtcagcaacatgctccagaaggccagacaaactctagaattttacccttgcacttctgaagagattgatcatgaagatatcacaaaagataaaaccagcacagtggaggcctgtttaccattggaattaaccaagaatgagagttgcctaaattccagagagacctctttcataactaatgggagttgcctggcctccagaaagacctcttttatgatggccctgtgccttagtagtatttatgaagacttgaagatgtaccaggtggagttcaagaccatgaatgcaaagcttctgatggatcctaagaggcagatctttctagatcaaaacatgctggcagttattgatgagctgatgcaggccctgaatttcaacagtgagactgtgccacaaaaatcctcccttgaagaaccggatttttataaaactaaaatcaagctctgcatacttcttcatgctttcagaattcgggcagtgactattgatagagtgatgagctatctgaatgcttcctaagctagcttgactgactgagatacagcgtaccttcagctcacagacatgataagatacattgatgagtttggacaaaccacaactagaatgcagtgaaaaaaatgctttatttgtgaaatttgtgatgctattgctttatttgtaaccattataagctgcaataaacaagttaacaacaacaattgcattcattttatgtttcaggttcagggggaggtgtgggaggttttttaaagcaagtaaaacctctacaaatgtggtagtcgtcagctatcctgcaggaacttgtttatttgaaaatcaattcacaaaatccgagtagttattttgcctcccccttcccatttaacagaatacaccaatctctccccacgcacagctttaaacatttggataccattagatatagacatggttttagattccacattccaaacagtttcagagcgagccaatctggggtcagtgatagataaaaatccatcgggatagtcttttaaagcgctttcacagtccaactgctgcggatgcgactccggagtctggatcacggtcatctggaagaagaacgatgggaatcataatccgaaaacggtatcggacgattgtgtctcatcaaacccacaagcagccgctgtctgcgtcgctccgtgcgactgctgtttatgggatcagggtccacagtgtcctgaagcatgattttaatagcccttaacatcaactttctggtgcgatgcgcgcagcaacgcattctgatttcactcaaatctttgcagtaggtacaacacattattacaatattgtttaataaaccataattaaaagcgctccagccaaaactcatatctgatataatcgcccctgcatgaccatcataccaaagtttaatataaattaaatgacgttccctcaaaaacacactacccacatacatgatctcttttggcatgtgcatattaacaatctgtctgtaccatggacaacgttggttaatcatgcaacccaatataaccttccggaaccacactgccaacaccgctcccccagccatgcattgaagtgaaccctgctgattacaatgacaatgaagaacccaattctctcgaccgtgaatcacttgagaatgaaaaatatctatagtggcacaacatagacataaatgcatgcatcttctcataatttttaactcctcaggatttagaaacatatcccagggaataggaagctcttgcagaacagtaaagctggcagaacaaggaagaccacgaacacaacttacactatgcatagtcatagtatcacaatctggcaacagcgggtggtcttcagtcatagaagctcgggtttcattttcctcacaacgtggtaactgggctctggtgtaagggtgatgtctggcgcatgatgtcgagcgtgcgcgcaaccttgtcataatggagttgcttcctgacattctcgtattttgtatagcaaaacgcggccctggcagaacacactcttcttcgccttctatcctgccgcttagcgtgttccgtgtgatagttcaagtacaaccacactcttaagttggtcaaaagaatgctggcttcagttgtaatcaaaactccatcgcatctaatcgttctgaggaaatcatccaagcaatgcaactggattgtgtttcaagcaggagaggagagggaagagacggaagaaccatgttaatttttattccaaacgatctcgcagtacttcaaattgtagatcgcgcagatggcatctctcgcccccactgtgttggtgaaaaagcacagctagatcaaaagaaatgcgattttcaaggtgctcaacggtggcttccagcaaagcctccacgcgcacatccaagaacaaaagaataccaaaagaaggagcattttctaactcctcaatcatcatattacattcctgcaccattcccagataattttcagctttccagccttgaattattcgtgtcagttcttgtggtaaatccaatccacacattacaaacaggtcccggagggcgccctccaccaccattcttaaacacaccctcataatgacaaaatatcttgctcctgtgtcacctgtagcgaattgagaatggcaacatcaattgacatgcccttggctctaagttcttctttaagttctagttgtaaaaactctctcatattatcaccaaactgcttagccagaagccccccgggaacaagagcaggggacgctacagtgcagtacaagcgcagacctccccaattggctccagcaaaaacaagattggaataagcatattgggaaccgccagtaatatcatcgaagttgctggaaatataatcaggcagagtttcttgtaaaaattgaataaaagaaaaatttgccaaaaaaacattcaaaacctctgggatgcaaatgcaataggttaccgcgctgcgctccaacattgttagttttgaattagtctgcaaaaataaaaaaaaaaacaagcgtcatatcatagtagcctgacgaacagatggataaatcagtctttccatcacaagacaagccacagggtctccagctcgaccctcgtaaaacctgtcatcatgattaaacaacagcaccgaaagttcctcgcggtgaccagcatgaataattcttgatgaagcatacaatccagacatgttagcatcagttaacgagaaaaaacagccaacatagcctttgggtataattatgcttaatcgtaagtatagcaaagccacccctcgcggatacaaagtaaaaggcacaggagaataaaaaatataattatttctctgctgctgttcaggcaacgtcgcccccggtccctctaaatacacatacaaagcctcatcagccatggcttaccagacaaagtacagcgggcacacaaagcacaagctctaaagtgactctccaacctctccacaatatatatatacacaagccctaaactgacgtaatgggagtaaagtgtaaaaaatcccgccaaacccaacacacaccccgaaactgcgtcaccagggaaaagtacagtttcacttccgcaatcccaacaggcgtaacttcctctttctcacggtacgtgatatcccactaacttgcaacgtcattttcccacggtcgcaccgccccttttagccgttaaccccacagccaatcaccacacgatccacactttttaaaatcacctcatttacatattggcaccattccatctataaggtatattatatagataga

SEQ ID NO: 100 - DNA, 35788 bp, Artificial Sequence
  Genome sequence of NG-757 virus
tctatctatataatataccttatagatggaatggtgccaatatgtaaatgaggtgattttaaaaagtgtggatcgtgtggtgattggctgtggggttaacggctaaaaggggcggtgcgaccgtgggaaaatgacgttttgtgggggtggagtttttttgcaagttgtcgcgggaaatgtgacgcataaaaaggcttttttctcacggaactacttagttttcccacggtatttaacaggaaatgaggtagttttgaccggatgcaagtgaaaattgttgattttcgcgcgaaaactgaatgaggaagtgtttttctgaataatgtggtatttatggcagggtggagtatttgttcagggccaggtagactttgacccattacgtggaggtttcgattaccgtgttttttacctgaatttccgcgtaccgtgtcaaagtcttctgtttttacgtaggtgtcagctgatcgctagggtatttatacctcagggtttgtgtcaagaggccactcttgagtgccagcgagaagagttttctcctctgcgccggcagtttaataataaaaaaatgagagatttgcgatttctgcctcaggaaataatctctgctgagactggaaatgaaatattggagcttgtggtgcacgccctgatgggagacgatccggagccacctgtgcagctttttgagcctcctacgcttcaggaactgtatgatttagaggtagagggatcggaggattctaatgaggaagctgtaaatggcttttttaccgattctatgcttttagctgctaatgaagggttagaattagatccgcctttggacacttttgatactccaggggtaattgtggaaagcggtacaggtgtaagaaaattacctgatttgagttccgtggactgtgatttgcactgctatgaagacgggtttcctccgagtgatgaggaggaccatgaaaaggagcagtccatgcagactgcagcgggtgagggagtgaaggctgccaatgttggttttcagttggattgcccggagcttcctggacatggctgtaagtcttgtgaatttcacaggaaaaatactggagtaaaggaactgttatgttcgctttgttatatgagaacgcactgccactttatttacagtaagtgtgtttaagttaaaatttaaaggaatatgctgtttttcacatgtatattgagtgtgagttttgtgcttcttattataggtcctgtgtctgatgctgatgaatcaccatctcctgattctactacctcacctcctgagattcaagcacctgttcctgtggacgtgcgcaagcccattcctgtgaagcttaagcctgggaaacgtccagcagtggaaaaacttgaggacttgttacagggtggggacggacctttggacttgagtacacggaaacgtccaagacaataagtgttccatatccgtgtttacttaaggtgacgtcaatatttgtgtgacagtgcaatgtaataaaaatatgttaactgttcactggtttttattgctttttgggcggggactcaggtatataagtagaagcagacctgtgtggttagctcataggagctggctttcatccatggaggtttgggccattttggaagaccttaggaagactaggcaactgttagagaacgcttcggacggagtctccggtttttggagattctggttcgctagtgaattagctagggtagtttttaggataaaacaggactataaacaagaatttgaaaagttgttggtagattgcccaggactttttgaagctcttaatttgggccatcaggttcactttaaagaaaaagttttatcagttttagacttttcaaccccaggtagaactgctgctgctgtggcttttcttacttttatattagataaatggatcccgcagactcatttcagcaggggatacgttttggatttcatagccacagcattgtggagaacatggaaggttcgcaagatgaggacaatcttaggttactggccagtgcagcctttgggtgtagcgggaatcctgaggcatccaccggtcatgccagcggttctggaggaggaacagcaagaggacaacccgagagccggcctggaccctccagtggaggaggcggagtagctgacttgtctcctgaactgcaacgggtgcttactggatctacgtccactggacgggataggggcgttaagagggagagggcatctagtggtactgatgctagatctgagttggctttaagtttaatgagtcgcagacgtcctgaaaccatttggtggcatgaggttcagaaagagggaagggatgaagtttctgtattgcaggagaaatattcactggaacaggtgaaaacatgttggttggagcctgaggatgattgggaggtggccattaaaaattatgccaagatagctttgaggcctgataaacagtataagattactagacggattaatatccggaatgcttgttacatatctggaaatggggctgaggtggtaatagatactcaagacaaggcagttattagatgctgcatgatggatatgtggcctggggtagtcggtatggaagcagtaacttttgtaaatgttaagtttaggggagatggttataatggaatagtgtttatggccaataccaaacttatattgcatggttgtagcttttttggtttcaacaatacctgtgtagatgcctggggacaggttagtgtacggggatgtagtttctatgcgtgttggattgccacagctggcagaaccaagagtcaattgtctctgaagaaatgcatatttcaaagatgtaacctgggcattctgaatgaaggcgaagcaagggtccgccactgcgcttctacagatactggatgttttattttgattaagggaaatgccagcgtaaagcataacatgatttgcggtgcttccgatgagaggccttatcaaatgctcacttgtgctggtgggcattgtaatatgctggctactgtgcatattgtttcccatcaacgcaaaaaatggcctgtttttgatcacaatgtgatgacgaagtgtaccatgcatgcaggtgggcgtagaggaatgtttatgccttaccagtgtaacatgaatcatgtgaaagtgttgttggaaccagatgccttttccagaatgagcctaacaggaatttttgacatgaacatgcaaatctggaagatcctgaggtatgatgatacgagatcgagggtacgcgcatgcgaatgcggaggcaagcatgccaggttccagccggtgtgtgtagatgtgactgaagatctcagaccggatcatttggttattgcccgcactggagcagagttcggatccagtggagaagaaactgactaaggtgagtattgggaaaactttggggtgggattttcagatggacagattgagtaaaaatttgttttttctgtcttgcagctgtcatgagtggaaacgcttcttttaaggggggagtcttcagcccttatctgacagggcgtctcccatcctgggcaggagttcgtcagaatgttatgggatctactgtggatggaagacccgtccaacccgccaattcttcaacgctgacctatgctactttaagttcttcacctttggacgcagctgcagctgccgccgccgcttctgttgccgctaacactgtgcttggaatgggttactatggaagcatcatggctaattccacttcctctaataacccttctaccctgactcaggacaagttacttgtccttttggcccagctggaggctttgacccaacgtctgggtgaactttctcagcaggtggtcgagttgcgagtacaaactgagtctgctgtcggcacggcaaagtctaaataaaaaaatcccagaatcaatgaataaataaacaagcttgttgttgatttaaaatcaagtgtttttatttcatttttcgcgcacggtatgccctagaccaccgatctctatcattgagaactcggtggattttttccaggatcctatagaggtgggattgaatgtttagatacatgggcattaggccgtctttggggtggagatagctccattgaagggattcatgctccggggtagtgttgtaaatcacccagtcataacaaggtcgcagtgcatggtgttgcacaatatcttttagaagtaggctgattgccacagataagcccttggtgtaggtgtttacaaaccggttgagctgggatgggtgcattcggggtgaaattatgtgcattttggattggatttttaagttggcaatattgccgccaagatcccgtcttgggttcatgttatgaaggaccaccaagacggtgtatccggtacatttaggaaatttatcgtgcagcttggatggaaaagcgtggaaaaatttggagacacccttgtgtcctccaagattttccatgcactcatccatgataatagcaatggggccgtgggcagcggcgcgggcaaacacgttccgtgggtctgacacatcatagttatgttcctgagttaaatcatcataagccattttaatgaatttggggcggagagtaccagattggggtatgaatgttccttcgggccccggagcatagttcccctcacagatttgcatttcccaagctttcagttccgagggtggaatcatgtccacctggggggctatgaaaaacaccgtttctggggcgggggtgattaattgtgatgatagcaaatttctgagcaattgagatttgccacatccggtggggccataaatgattccgattacgggttgcaggtggtagtttagggaacggcaactgccgtcttctcgaagcaagggggccacctcgttcatcatttcccttacatgcatattttcccgcaccaaatccattaggaggcgctctcctcctagtgatagaagttcttgtagtgaggaaaagtttttcagcggtttcagaccgtcagccatgggcattttggagagagtttgctgcaaaagttctagtctgttccacagttcagtgatgtgttctatggcatctcgatccagcagacctcctcgtttcgcgggtttggacggctcctggaatagggtatgagacgatgggcgtccagcgctgccagggttcggtccttccagggtctcagtgttcgagtcagggttgtttccgtcacagtgaaggggtgtgcgcctgcttgggcgcttgccagggtgcgcttcagactcatcctgctggtcgaaaacttctgtcgcttggcgccctgtatgtcggccaagtagcagtttaccatgagttcgtagttgagcgcctcggctgcgtggcctttggcgcggagcttacctttggaagttttcttgcataccgggcagtataggcatttcagcgcatacaacttgggcgcaaggaaaacggattctggggagtatgcatctgcgccgcaggaggcgcaaacagtttcacattccaccagccaggttaaatccggttcattggggtcaaaaacaagttttccgccatattttttgatgcgtttcttacctttggtctccatgagttcgtgtcctcgttgagtgacaaacaggctgtccgtgtccccgtagactgattttacaggcctcttctccagtggagtgcctcggtcttcttcgtacaggaactctgaccactctgatacaaaggcgcgcgtccaggccagcacaaaggaggctatgtgggaggggtagcgatcgttgtcaaccagggggtccaccttttccaaagtatgcaaacacatgtcaccctcttcaacatccaggaatgtgattggcttgtaggtgtatttcacgtgacctggggtccccgctgggggggtataaaagggggcggttctttgctcttcctcactgtcttccggatcgctgtccaggaacgtcagctgttggggtaggtattccctctcgaaggcgggcatgacctctgcactcaggttgtcagtttctaagaacgaggaggatttgatattgacagtgccggttgagatgcctttcatgaggttttcgtccatctggtcagaaaacacaatttttttattgtcaagtttggtggcaaatgatccatacagggcgttggataaaagtttggcaatggatcgcatggtttggttcttttccttgtccgcgcgctctttggcggcgatgttgagttggacatactcgcgtgccaggcacttccattcggggaagatagttgttaattcatctggcacgattctcacttgccaccctcgattatgcaaggtaattaaatccacactggtggccacctcgcctcgaaggggttcattggtccaacagagcctacctcctttcctagaacagaaagggggaagtgggtctagcataagttcatcgggagggtctgcatccatggtaaagattcccggaagtaaatccttatcaaaatagctgatgggagtggggtcatctaaggccatttgccattctcgagctgccagtgcgcgctcatatgggttaaggggactgccccatggcatgggatgggtgagtgcagaggcatacatgccacagatgtcatagacgtagatgggatcctcaaagatgcctatgtaggttggatagcatcgcccccctctgatacttgctcgcacatagtcatatagttcatgtgatggcgctagcagccccggacccaagttggtgcgattgggtttttctgttctgtagacgatctggcgaaagatggcgtgagaattggaagagatggtgggtctttgaaaaatgttgaaatgggcatgaggtagacctacagagtctctgacaaagtgggcataagattcttgaagcttggttaccagttcggcggtgacaagtacgtctagggcgcagtagtcaagtgtttcttgaatgatgtcataacctggttggtttttcttttcccacagttcgcggttgagaaggtattcttcgcgatccttccagtactcttctagcggaaacccgtctttgtctgcacggtaagatcctagcatgtagaactgattaactgccttgtaagggcagcagcccttctctacgggtagagagtatgcttgagcagcttttcgtagcgaagcgtgagtaagggcaaaggtgtctctgaccatgactttgaggaattggtatttgaagtcgatgtcgtcacaggctccctgttcccagagttggaagtctacccgtttcttgtaggcggggttgggcaaagcgaaagtaacatcattgaagagaatcttgccggccctgggcatgaaattgcgagtgatgcgaaaaggctgtggtacttccgctcggttattgataacctgggcagctaggacgatctcgtcgaaaccgttgatgttgtgtcctacgatgtataattctatgaaacgcggcgtgcctctgacgtgaggtagcttactgagctcatcaaaggttaggtctgtggggtcagataaggcgtagtgttcgagagcccattcgtgcaggtgaggattcgctttaaggaaggaggaccagaggtccactgccagtgctgtttgtaactggtcccggtactgacgaaaatgccgtccgactgccattttttctggggtgacgcaatagaaggtttgggggtcctgccgccagcgatcccacttgagttttatggcgaggtcataggcgatgttgacgagccgctggtctccagagagtttcatgaccagcatgaaggggattagctgcttgccaaaggaccccatccaggtgtaggtttccacatcgtaggtgagaaagagcctttctgtgcgaggatgagagccaatcgggaagaactggatctcctgccaccagttggaggaatggctgttgatgtgatggaagtagaactccctgcgacgcgccgagcattcatgcttgtgcttgtacagacggccgcagtagtcgcagcgttgcacgggttgtatctcgtgaatgagttgtacctggcttcccttgacgagaaatttcagtgggaagccgaggcctggcgattgtatctcgtgctttactatgttgtctgcatcggcctgttcatcttctgtctcgatggtggtcatgctgacgagccctcgcgggaggcaagtccagacctcggcgcggcaggggcggagctcgaggacgagagcgcgcaggctggagctgtccagggtcctgagacgctgcggactcaggttagtaggcagtgtcaggagattaacttgcatgatcttttggagggcgtgcgggaggttcagatagtacttgatctcaacgggtccgttggtggagatgtcgatggcttgcagggttccgtgtcccttgggcgctaccaccgtgcccttgtttttcattttggacggcggtggctctgttgcttcttgcatgtttagaagcggtgtcgagggcgcgcaccgggcggcaggggcggctcgggacccggcggcatggctggcagtggtacgtcggcgccgcgcgcgggtaggttctggtactgcgccctgagaagactcgcatgcgcgacgacgcggcggttgacatcctggatctgacgcctctgggtgaaagctaccggccccgtgagcttgaacctgaaagagagttcaacagaatcaatctcggtatcgttgacggcggcttgcctaaggatttcttgcacgtcaccagagttgtcctggtaggcgatctccgccatgaactgctcgatctcttcctcttgaagatctccgcggcccgctctctcgacggtggccgcgaggtcgttggagatgcgcccaatgagttgagagaatgcattcatgcccgcctcgttccagacgcggctgtagaccacggcccccacgggatctctcgcgcgcatgaccacctgggcgaggttgagctccacgtggcgggtgaagaccgcatagttgcataggcgctggaaaaggtagttgagtgtggtggcgatgtgctcggtgacgaagaaatacatgatccatcgtctcagcggcatctcgctgacatcgcccagagcttccaagcgctccatggcctcgtagaagtccacggcaaaattaaaaaactgggagtttcgcgcggacacggtcaactcctcttccagaagacggataagttcggcgatggtggtgcgcacctcgcgctcgaaagcccctgggatttcttcctcaatctcttcttcttccactaacatctcttcctcttcaggtggggctgcaggaggagggggaacgcggcgacgccggcggcgcacgggcagacggtcgatgaatctttcaatgacctctccgcggcggcggcgcatggtttcagtgacggcgcggccgttctcgcgcggtcgcagagtaaaaacaccgccgcgcatctccttaaagtggtgactgggaggttctccgtttgggagggagagggcgctgattatacattttattaattggcccgtagggactgcacgcagagatctgatcgtgtcaagatccacgggatctgaaaacctttcgacgaaagcgtctaaccagtcacagtcacaaggtaggctgagtacggcttcttgtgggcgggggtggttatgtgttcggtctgggtcttctgtttcttcttcatctcgggaaggtgagacgatgctgctggtgatgaaattaaagtaggcagttctaagacggcggatggtggcgaggagcaccaggtctttgggtccggcttgctggatacgcaggcgattggccattccccaagcattatcctgacatctagcaagatctttgtagtagtcttgcatgagccgttctacgggcacttcttcctcacccgttctgccatgcatacgtgtgagtccaaatccgcgcattggttgtaccagtgccaagtcagctacgactctttcggcgaggatggcttgctgtacttgggtaagggtggcttgaaagtcatcaaaatccacaaagcggtggtaagctcctgtattaatggtgtaagcacagttggccatgactgaccagttaactgtctggtgaccagggcgcacgagctcggtgtatttaaggcgcgaataggcgcgggtgtcaaagatgtaatcgttgcaggtgcgcaccagatactggtaccctataagaaaatgcggcggtggttggcggtagagaggccatcgttctgtagctggagcgccaggggcgaggtcttccaacataaggcggtgatagccgtagatgtacctggacatccaggtgattcctgcggcggtagtagaagcccgaggaaactcgcgtacgcggttccaaatgttgcgtagcggcatgaagtagttcattgtaggcacggtttgaccagtgaggcgcgcgcagtcattgatgctctatagacacggagaaaatgaaagcgttcagcgactcgactccgtagcctggaggaacgtgaacgggttgggtcgcggtgtaccccggttcgagacttgtactcgagccggccggagccgcggctaacgtggtattggcactcccgtctcgacccagcctacaaaaatccaggatacggaatcgagtcgttttgctggtttccgaatggcagggaagtgagtcctattttttttttttgccgctcagatgcatcccgtgctgcgacagatgcgcccccaacaacagcccccctcgcagcagcagcagcagcaatcacaaaaggctgtccctgcaactactgcaactgccgccgtgagcggtgcgggacagcccgcctatgatctggacttggaagagggcgaaggactggcacgtctaggtgcgccttcacccgagcggcatccgcgagttcaactgaaaaaagattctcgcgaggcgtatgtgccccaacagaacctatttagagacagaagcggcgaggagccggaggagatgcgagcttcccgctttaacgcgggtcgtgagctgcgtcacggtttggaccgaagacgagtgttgcgggacgaggatttcgaagttgatgaaatgacagggatcagtcctgccagggcacacgtggctgcagccaaccttgtatcggcttacgagcagacagtaaaggaagagcgtaacttccaaaagtcttttaataatcatgtgcgaaccctgattgcccgcgaagaagttacccttggtttgatgcatttgtgggatttgatggaagctatcattcagaaccctactagcaaacctctgaccgcccagctgtttctggtggtgcaacacagcagagacaatgaggctttcagagaggcgctgctgaacatcaccgaacccgaggggagatggttgtatgatcttatcaacattctacagagtatcatagtgcaggagcggagcctgggcctggccgagaaggtggctgccatcaattactcggttttgagcttgggaaaatattacgctcgcaaaatctacaagactccatacgttcccatagacaaggaggtgaagatagatgggttctacatgcgcatgacgctcaaggtcttgaccctgagcgatgatcttggggtgtatcgcaatgacagaatgcatcgcgcggttagcgccagcaggaggcgcgagttaagcgacagggaactgatgcacagtttgcaaagagctctgactggagctggaaccgagggtgagaattacttcgacatgggagctgacttgcagtggcagcctagtcgcagggctctgagcgccgcgacggcaggatgtgagcttccttacatagaagaggcggatgaaggcgaggaggaagagggcgagtacttggaagactgatggcacaacccgtgttttttgctagatggaacagcaagcaccggatcccgcaatgcgggcggcgctgcagagccagccgtccggcattaactcctcggacgattggacccaggccatgcaacgtatcatggcgttgacgactcgcaaccccgaagcctttagacagcaaccccaggccaaccgtctatcggccatcatggaagctgtagtgccttcccgctctaatcccactcatgagaaggtcctggccatcgtgaacgcgttggtggagaacaaagctattcgtccagatgaggccggactggtatacaacgctctcttagaacgcgtggctcgctacaacagtagcaatgtgcaaaccaatttggaccgtatgataacagatgtacgcgaagccgtgtctcagcgcgaaaggttccagcgtgatgccaacctgggttcgctggtggcgttaaatgctttcttgagtactcagcctgctaatgtgccgcgtggtcaacaggattatactaactttttaagtgctttgagactgatggtatcagaagtacctcagagcgaagtgtatcagtccggtcctgattacttctttcagactagcagacagggcttgcagacggtaaatctgagccaagcttttaaaaaccttaaaggtttgtggggagtgcatgccccggtaggagaaagagcaaccgtgtctagcttgttaactccgaactcccgcctattattactgttggtagctcctttcaccgacagcggtagcatcgaccgtaattcctatttgggttacctactaaacctgtatcgcgaagccatagggcaaagtcaggtggacgagcagacctatcaagaaattacccaagtcagtcgcgctttgggacaggaagacactggcagtttggaagccactctgaacttcttgcttaccaatcggtctcaaaagatccctcctcaatatgctcttactgcggaggaggagaggatccttagatatgtgcagcagagcgtgggattgtttctgatgcaagagggggcaactccgactgcagcactggacatgacagcgcgaaatatggagcccagcatgtatgccagtaaccgacctttcattaacaaactgctggactacttgcacagagctgccgctatgaactctgattatttcaccaatgccatcttaaacccgcactggctgcccccacctggtttctacacgggcgaatatgacatgcccgaccctaatgacggatttctgtgggacgacgtggacagcgatgttttttcacctctttctgatcatcgcacgtggaaaaaggaaggcggcgatagaatgcattcttctgcatcgctgtccggggtcatgggtgctaccgcggctgagcccgagtctgcaagtccttttcctagtctacccttttctctacacagtgtacgtagcagcgaagtgggtagaataagtcgcccgagtttaatgggcgaagaggagtatctaaacgattccttgctcagaccggcaagagaaaaaaatttcccaaacaatggaatagaaagtttggtggataaaatgagtagatggaagacttatgctcaggatcacagagacgagcctgggatcatggggattacaagtagagcgagccgtagacgccagcgccatgacagacagaggggtcttgtgtgggacgatgaggattcggccgatgatagcagcgtgctggacttgggtgggagaggaaggggcaacccgtttgctcatttgcgccctcgcttgggtggtatgttgtaaaaaaaaataaaaaaaaaactcaccaaggccatggcgacgagcgtacgttcgttcttctttattatctgtgtctagtataatgaggcgagtcgtgctaggcggagcggtggtgtatccggagggtcctcctccttcgtacgagagcgtgatgcagcagcagcaggcgacggcggtgatgcaatccccactggaggctccctttgtgcctccgcgatacctggcacctacggagggcagaaacagcattcgttattcggaactggcacctcagtacgataccaccaggttgtatctggtggacaacaagtcggcggacattgcttctctgaactatcagaatgaccacagcaacttcttgaccacggtggtgcaaaacaatgactttacccctacggaagccagcacccagaccattaactttgatgaacgatcgcggtggggcggtcagctaaagaccatcatgcatactaacatgccaaacgtgaacgagtatatgtttagtaacaagttcaaagcgcgtgtgatggtgtccagaaaacctcccgacggtgctgcagttggggatacttatgatcacaagcaggatattttgaaatatgagtggttcgagtttactttgccagaaggcaacttttcagttactatgactattgatttgatgaacaatgccatcatagataattacttgaaagtgggtagacagaatggagtgcttgaaagtgacattggtgttaagttcgacaccaggaacttcaagctgggatgggatcccgaaaccaagttgatcatgcctggagtgtatacgtatgaagccttccatcctgacattgtcttactgcctggctgcggagtggattttaccgagagtcgtttgagcaaccttcttggtatcagaaaaaaacagccatttcaagagggttttaagattttgtatgaagatttagaaggtggtaatattccggccctcttggatgtagatgcctatgagaacagtaagaaagaacaaaaagccaaaatagaagctgctacagctgctgcagaagctaaggcaaacatagttgccagcgactctacaagggttgctaacgctggagaggtcagaggagacaattttgcgccaacacctgttccgactgcagaatcattattggccgatgtgtctgaaggaacggacgtgaaactcactattcaacctgtagaaaaagatagtaagaatagaagctataatgtgttggaagacaaaatcaacacagcctatcgcagttggtatctttcgtacaattatggcgatcccgaaaaaggagtgcgttcctggacattgctcaccacctcagatgtcacctgcggagcagagcaggtctactggtcgcttccagacatgatgaaggatcctgtcactttccgctccactagacaagtcagtaactaccctgtggtgggtgcagagcttatgcccgtcttctcaaagagcttctacaacgaacaagctgtgtactcccagcagctccgccagtccacctcgcttacgcacgtcttcaaccgctttcctgagaaccagattttaatccgtccgccggcgcccaccattaccaccgtcagtgaaaacgttcctgctctcacagatcacgggaccctgccgttgcgcagcagtatccggggagtccaacgtgtgaccgttactgacgccagacgccgcacctgtccctacgtgtacaaggcactgggcatagtcgcaccgcgcgtcctttcaagccgcactttctaaaaaaaaaaaaaatgtccattcttatctcgcccagtaataacaccggttggggtctgcgcgctccaagcaagatgtacggaggcgcacgcaaacgttctacccaacatcctgtccgtgttcgcggacattttcgcgctccatggggcgccctcaagggccgcactcgcgttcgaaccaccgtcgatgatgtaatcgatcaggtggttgccgacgcccgtaattatactcctactgcgcctacatctactgtggatgcagttattgacagtgtagtggctgacgctcgcaactatgctcgacgtaagagccggcgaaggcgcattgccagacgccaccgagctaccactgccatgcgagccgcaagagctctgctacgaagagctagacgcgtggggcgaagagccatgcttagggcggccagacgtgcagcttcgggcgccagcgccggcaggtcccgcaggcaagcagccgctgtcgcagcggcgactattgccgacatggcccaatcgcgaagaggcaatgtatactgggtgcgtgacgctgccaccggtcaacgtgtacccgtgcgcacccgtccccctcgcacttagaagatactgagcagtctccgatgttgtgtcccagcggcgaggatgtccaagcgcaaatacaaggaagaaatgctgcaggttatcgcacctgaagtctacggccaaccgttgaaggatgaaaaaaaaccccgcaaaatcaagcgggttaaaaaggacaaaaaagaagaggaagatggcgatgatgggctggcggagtttgtgcgcgagtttgccccacggcgacgcgtgcaatggcgtgggcgcaaagttcgacatgtgttgagacctggaacttcggtggtctttacacccggcgagcgttcaagcgctacttttaagcgttcctatgatgaggtgtacggggatgatgatattcttgagcaggcggctgaccgattaggcgagtttgcttatggcaagcgtagtagaataacttccaaggatgagacagtgtcgatacccttggatcatggaaatcccacccctagtcttaaaccggtcactttgcagcaagtgttacccgtaactccgcgaacaggtgttaaacgcgaaggtgaagatttgtatcccactatgcaactgatggtacccaaacgccagaagttggaggacgttttggagaaagtaaaagtggatccagatattcaacctgaggttaaagtgagacccattaagcaggtagcgcctggtctgggggtacaaactgtagacattaagattcccactgaaagtatggaagtgcaaactgaacccgcaaagcctactgccacctccactgaagtgcaaacggatccatggatgcccatgcctattacaactgacgccgccggtcccactcgaagatcccgacgaaagtacggtccagcaagtctgttgatgcccaattatgttgtacacccatctattattcctactcctggttaccgaggcactcgctactatcgcagccgaaacagtacctcccgccgtcgccgcaagacacctgcaaatcgcagtcgtcgccgtagacgcacaagcaaaccgactcccggcgccctggtgcggcaagtgtaccgcaatggtagtgcggaacctttgacactgccgcgtgcgcgttaccatccgagtatcatcacttaatcaatgttgccgctgcctccttgcagatatggccctcacttgtcgccttcgcgttcccatcactggttaccgaggaagaaactcgcgccgtagaagagggatgttgggacgcggaatgcgacgctacaggcgacggcgtgctatccgcaagcaattgcggggtggttttttaccagccttaattccaattatcgctgctgcaattggcgcgataccaggcatagcttccgtggcggttcaggcctcgcaacgacattgacattggaaaaaaacgtataaataaaaaaaaaaaaatacaatggactctgacactcctggtcctgtgactatgttttcttagagatggaagacatcaatttttcatccttggctccgcgacacggcacgaagccgtacatgggcacctggagcgacatcggcacgagccaactgaacgggggcgccttcaattggagcagtatctggagcgggcttaaaaattttggctcaaccataaaaacatacgggaacaaagcttggaacagcagtacaggacaggcgcttagaaataaacttaaagaccagaacttccaacaaaaagtagtcgatgggatagcttccggcatcaatggagtggtagatttggctaaccaggctgtgcagaaaaagataaacagtcgtttggacccgccgccagcaaccccaggtgaaatgcaagtggaggaagaaattcctccgccagaaaaacgaggcgacaagcgtccgcgtcccgatttggaagagacgctggtgacgcgcgtagatgaaccgccttcttatgaggaagcaacgaagcttggaatgcccaccactagaccgatagccccaatggccaccggggtgatgaaaccttctcagttgcatcgacccgtcaccttggatttgccccctccccctgctgctactgctgtacccgcttctaagcctgtcgctgccccgaaaccagtcgccgtagccaggtcacgtcccgggggcgctcctcgtccaaatgcgcactggcaaaatactctgaacagcatcgtgggtctaggcgtgcaaagtgtaaaacgccgtcgctgcttttaattaaatatggagtagcgcttaacttgcctatctgtgtatatgtgtcattacacgccgtcacagcagcagaggaaaaaaggaagaggtcgtgcgtcgacgctgagttactttcaagatggccaccccatcgatgctgccccaatgggcatacatgcacatcgccggacaggatgcttcggagtacctgagtccgggtctggtgcagttcgcccgcgccacagacacctacttcaatctgggaaataagtttagaaatcccaccgtagcgccgacccacgatgtgaccaccgaccgtagccagcggctcatgttgcgcttcgtgcccgttgaccgggaggacaatacatactcttacaaagtgcggtacaccctggccgtgggcgacaacagagtgctggatatggccagcacgttctttgacattaggggtgtgttggacagaggtcccagtttcaaaccctattctggtacggcttacaactccctggctcctaaaggcgctccaaatacatctcagtggattgcagaaggtgtaaaaaatacaactggtgaggaacacgtaacagaagaggaaaccaatactactacttacacttttggcaatgctcctgtaaaagctgaagctgaaattacaaaagaaggactcccagtaggtttggaagtttcagatgaagaaagtaaaccgatttatgctgataaaacatatcagccagaacctcagctgggagatgaaacttggactgaccttgatggaaaaaccgaaaagtatggaggcagggctctcaaacccgatactaagatgaaaccatgctacgggtcctttgccaaacctactaatgtgaaaggcggtcaggcaaaacaaaaaacaacggagcagccaaatcagaaagtcgaatatgatatcgacatggagttttttgatgcggcatcgcagaaaacaaacttaagtcctaaaattgtcatgtatgcagaaaatgtaaatttggaaactccagacactcatgtagtgtacaaacctggaacagaagacacaagttccgaagctaatttgggacaacaatctatgcccaacagacccaactacattggcttcagagataactttattggacttatgtactataacagtactggtaacatgggggtgctggctggtcaagcgtctcagttaaatgcagtggttgacttgcaggacagaaacacagaactttcttaccaactcttgcttgactctctgggcgacagaaccagatactttagcatgtggaatcaggctgtggacagttatgatcctgatgtacgtgttattgaaaatcatggtgtggaagatgaacttcccaactactgttttccactggacggcataggtgttccaacaaccagttacaaatcaatagttccaaatggagacaatgcgcctaattggaaggaacctgaagtaaatggaacaagtgagatcggacagggtaatttgtttgccatggaaattaaccttcaagccaatctatggcgaagtttcctttattccaatgtggctctatatctcccagactcgtacaaatacaccccgtccaatgtcactcttccagaaaacaaaaacacctacgactacatgaacgggcgggtggtgccgccatctctagtagacacctatgtgaacattggtgccaggtggtctctggatgccatggacaatgtcaacccattcaaccaccaccgtaacgctggcttgcgttaccgatccatgcttctgggtaacggacgttatgtgcctttccacatacaagtgcctcaaaaattcttcgctgttaaaaacctgctgcttctcccaggctcctacacttatgagtggaactttaggaaggatgtgaacatggttctacagagttccctcggtaacgacctgcgggtagatggcgccagcatcagtttcacgagcatcaacctctatgctacttttttccccatggctcacaacaccgcttccacccttgaagccatgctgcggaatgacaccaatgatcagtcattcaacgactacctatctgcagctaacatgctctaccccattcctgccaatgcaaccaatattcccatttccattccttctcgcaactgggcggctttcagaggctggtcatttaccagactgaaaaccaaagaaactccctctttggggtctggatttgacccctactttgtctattctggttctattccctacctggatggtaccttctacctgaaccacacttttaagaaggtttccatcatgtttgactcttcagtgagctggcctggaaatgacaggttactatctcctaacgaatttgaaataaagcgcactgtggatggcgaaggctacaacgtagcccaatgcaacatgaccaaagactggttcttggtacagatgctcgccaactacaacatcggctatcagggcttctacattccagaaggatacaaagatcgcatgtattcatttttcagaaacttccagcccatgagcaggcaggtggttgatgaggtcaattacaaagacttcaaggccgtcgccataccctaccaacacaacaactctggctttgtgggttacatggctccgaccatgcgccaaggtcaaccctatcccgctaactatccctatccactcattggaacaactgccgtaaatagtgttacgcagaaaaagttcttgtgtgacagaaccatgtggcgcataccgttctcgagcaacttcatgtctatgggggcccttacagacttgggacagaatatgctctatgccaactcagctcatgctctggacatgacctttgaggtggatcccatggatgagcccaccctgctttatcttctcttcgaagttttcgacgtggtcagagtgcatcagccacaccgcggcatcatcgaggcagtctacctgcgtacaccgttctcggccggtaacgctaccacgtaagaagcttcttgcttcttgcaaatagcagctgcaaccatggcctgcggatcccaaaacggctccagcgagcaagagctcagagccattgtccaagacctgggttgcggaccctattttttgggaacctacgataagcgcttcccggggttcatggcccccgataagctcgcctgtgccattgtaaatacggccggacgtgagacggggggagagcactggttggctttcggttggaacccacgttctaacacctgctacctttttgatccttttggattctcggatgatcgtctcaaacagatttaccagtttgaatatgagggtctcctgcgccgcagcgctcttgctaccaaggaccgctgtattacgctggaaaaatctacccagaccgtgcagggtccccgttctgccgcctgcggacttttctgctgcatgttccttcacgcctttgtgcactggcctgaccgtcccatggacggaaaccccaccatgaaattgctaactggagtgccaaacaacatgcttcattctcctaaagtccagcccaccctgtgtgacaatcaaaaagcactctaccattttcttaatacccattcgccttattttcgctcccatcgtacacacatcgaaagggccactgcgttcgaccgtatggatgttcaataatgactcatgtaaacaacgtgttcaataaacatcactttatttttttacatgtatcaaggctctgcattacttatttatttacaagtcgaatgggttctgacgagaatcagaatgacccgcaggcagtgatacgttgcggaactgatacttgggttgccacttgaattcgggaatcaccaacttgggaaccggtatatcgggcaggatgtcactccacagctttctggtcagctgcaaagctccaagcaggtcaggagccgaaatcttgaaatcacaattaggaccagtgctttgagcgcgagagttgcggtacaccggattgcagcactgaaacaccatcagcgacggatgtctcacgcttgccagcacggtgggatctgcaatcatgcccacatccagatcttcagcattggcaatgctgaacggggtcatcttgcaggtctgcctacccatggcgggcacccaattaggcttgtggttgcaatcgcagtgcagggggatcagtatcatcttggcctgatcctgtctgattcctggatacacggctctcatgaaagcatcatattgcttgaaagcctgctgggctttactaccctcggtataaaacatcccgcaggacctgctcgaaaactggttagctgcacagccggcatcattcacacagcagcgggcgtcattgttagctatttgcaccacacttctgccccagcggttttgggtgattttggttcgctcgggattctcctttaaggctcgttgtccgttctcgctggccacatccatctcgataatctgctccttctgaatcataatattgccatgcaggcacttcagcttgccctcataatcattgcagccatgaggccacaacgcacagcctgtacattcccaattatggtgggcgatctgagaaaaagaatgtatcattccctgcagaaatcttcccatcatcgtgctcagtgtcttgtgactagtgaaagttaactggatgcctcggtgctcctcgtttacgtactggtgacagatgcgcttgtattgttcgtgttgctcaggcattagtttaaaagaggttctaagttcgttatccagcctgtacttctccatcagcagacacatcacttccatgcctttctcccaagcagacaccaggggcaagctaatcggattcttaacagtgcaggcagcagctcctttagccagagggtcatctttagcgatcttctcaatgcttcttttgccatccttctcaacgatgcgcacgggcgggtagctgaaacccactgctacaagttgcgcctcttctctttcttcttcgctgtcttgactgatgtcttgcatggggatatgtttggtcttccttggcttctttttggggggtatcggaggaggaggactgtcgctccgttccggagacagggaggattgtgacgtttcgctcaccattaccaactgactgtcggtagaagaacctgaccccacacggcgacaggtgtttctcttcgggggcagaggtggaggcgattgcgaagggctgcggtccgacctggaaggcggatgactggcagaaccccttccgcgttcgggggtgtgctccctgtggcggtcgcttaactgatttccttcgcggctggccattgtgttctcctaggcagagaaacaacagacatggaaactcagccattgctgtcaacatcgccacgagtgccatcacatctcgtcctcagcgacgaggaaaaggagcagagcttaagcattccaccgcccagtcctgccaccacctctaccctagaagataaggaggtcgacgcatctcatgacatgcagaataaaaaagcgaaagagtctgagacagacatcgagcaagacccgggctatgtgacaccggtggaacacgaggaagagttgaaacgctttctagagagagaggatgaaaactgcccaaaacaacgagcagataactatcaccaagatgctggaaatagggatcagaacaccgactacctcatagggcttgacggggaagacgcgctccttaaacatctagcaagacagtcgctcatagtcaaggatgcattattggacagaactgaagtgcccatcagtgtggaagagctcagccgcgcctacgagcttaacctcttttcacctcgtactccccccaaacgtcagccaaacggcacctgcgagccaaatcctcgcttaaacttttatccagcttttgctgtgccagaagtactggctacctatcacatcttttttaaaaatcaaaaaattccagtctcctgccgcgctaatcgcacccgcgccgatgccctactcaatctgggacctggttcacgcttacctgatatagcttccttggaagaggttccaaagatcttcgagggtctgggcaataatgagactcgggccgcaaatgctctgcaaaagggagaaaatggcatggatgagcatcacagcgttctggtggaattggaaggcgataatgccagactcgcagtactcaagcgaagcatcgaggtcacacacttcgcatatcccgctgtcaacctgccccctaaagtcatgacggcggtcatggaccagttactcattaagcgcgcaagtcccctttcagaagacatgcatgacccagatgcctgtgatgagggtaaaccagtggtcagtgatgagcagctaacccgatggctgggcaccgactctcccagggatttggaagagcgtcgcaagcttatgatggccgtggtgctggttaccgtagaactagagtgtctccgacgtttctttaccgattcagaaaccttgcgcaaactcgaagagaatctgcactacacttttagacacggctttgtgcggcaggcatgcaagatatctaacgtggaactcaccaacctggtttcctacatgggtattctgcatgagaatcgcctaggacaaagcgtgctgcacagcaccctgaagggggaagcccgccgtgattacatccgcgattgtgtctatctgtacctgtgccacacgtggcaaaccggcatgggtgtatggcagcaatgtttagaagaacagaacttgaaagagcttgacaagctcttacagaaatctcttaaggttctgtggacagggttcgacgagcgcaccgtcgcttccgacctggcagacctcatcttcccagagcgtctcagggttactttgcgaaacggattgcctgactttatgagccagagcatgcttaacaattttcgctctttcatcctggaacgctccggtatcctgcccgccacctgctgcgcactgccctccgactttgtgcctctcacctaccgcgagtgccccccgccgctatggagtcactgctacctgttccgtctggccaactatctctcctaccactcggatgtgatcgaggatgtgagcggagacggcttgctggagtgtcactgccgctgcaatctgtgcacgccccaccggtccctagcttgcaacccccagttgatgagcgaaacccagataataggcacctttgaattgcaaggccccagcagccaaggcgatgggtcttctcctgggcaaagtttaaaactgaccccgggactgtggacctccgcctacttgcgcaagtttgctccggaagattaccacccctatgaaatcaagttctatgaggaccaatcacagcctccaaaggccgaactttcggcctgcgtcatcacccagggggcaattctggcccaattgcaagccatccaaaaatcccgccaagaatttctactgaaaaagggtaagggggtctaccttgacccccagaccggcgaggaactcaacacaaggttccctcaggatgtcccaacgacgagaaaacaagaagttgaaggtgcagccgccgcccccagaagatatggaggaagattgggacagtcaggcagaggaggcggaggaggacagtctggaggacagtctggaggaagacagtttggaggaggaaaacgaggaggcagaggaggtggaagaagtaaccgccgacaaacagttatcctcggctgcggagacaagcaacagcgctaccatctccgctccgagtcgaggaacccggcggcgtcccagcagtagatgggacgagaccggacgcttcccgaacccaaccagcgcttccaagaccggtaagaaggatcggcagggatacaagtcctggcgggggcataagaatgccatcatctcctgcttgcatgagtgcgggggcaacatatccttcacgcggcgctacttgctattccaccatggggtgaactttccgcgcaatgttttgcattactaccgtcacctccacagcccctactatagccagcaaatcccggcagtctcgacagataaagacagcggcggcgacctccaacagaaaaccagcagcggcagttagaaaatacacaacaagtgcagcaacaggaggattaaagattacagccaacgagccagcgcaaacccgagagttaagaaatcggatctttccaaccctgtatgccatcttccagcagagtcggggtcaagagcaggaactgaaaataaaaaaccgatctctgcgttcgctcaccagaagttgtttgtatcacaagagcgaagatcaacttcagcgcactctcgaggacgccgaggctctcttcaacaagtactgcgcgctgactcttaaagagtaggcagcgaccgcgcttattcaaaaaaggcgggaattacatcatcctcgacatgagtaaagaaattcccacgccttacatgtggagttatcaaccccaaatgggattggcggcaggcgcctcccaggactactccacccgcatgaattggctcagcgccgggccttctatgatttctcgagttaatgatatacgcgcctaccgaaaccaaatacttttggaacagtcagctcttaccaccacgccccgccaacaccttaatcccagaaattggcccgccgccctagtgtaccaggaaagtcccgctcccaccactgtattacttcctcgagacgcccaggccgaagtccaaatgactaatgcaggtgcgcagttagctggcggctccaccctatgtcgtcacaggcctcggcataatataaaacgcctgatgatcagaggccgaggtatccagctcaacgacgagtcggtgagctctccgcttggtctacgaccagacggaatctttcagattgccggctgcgggagatcttccttcacccctcgtcaggctgttctgactttggaaagttcgtcttcgcaaccccgctcgggcggaatcgggaccgttcaatttgtggaggagtttactccctctgtctacttcaaccccttctccggatctcctgggcattacccggacgagttcataccgaacttcgacgcgattagcgagtcagtggacggctacgattgatgtctggtgacgcggctgagctatctcggctgcgacatctagaccactgccgccgctttcgctgctttgcccgggaactcattgagttcatctacttcgaactccccaaggatcaccctcaaggtccggcccacggagtgcggatttctatcgaaggcaaaatagactctcgcctgcaacgaattttctcccagcggcccgtgctgatcgagcgagaccagggaaacaccacggtttccatctactgcatttgtaatcaccccggattgcatgaaagcctttgctgtcttatgtgtactgagtttaataaaaactgaattaagactctcctacggactgccgcttcttcaacccggattttacaaccagaagaacgaaacttttcctgtcgtccaggactctgttaacttcacctttcctactcacaaactagaagctcaacgactacaccgcttttccagaagcattttccctactaatactactttcaaaaccggaggtgagctccaaggtcttcctacagaaaacccttgggtggaagcgggccttgtagtgctaggaattcttgcgggtgggcttgtgattattctttgctacctatacacaccttgcttcactttcttagtggtgttgtggtattggtttaaaaaatggggcccatactagtcttgcttgttttactttcgcttttggaaccgggttctgccaattacgatccatgtctagacttcgacccagaaaactgcacacttacttttgcacccgacacaagccgcatctgtggagttcatcgcctctcttacgaacttggcccccaacgacaaaaatttacctgcatggtgggaatcaaccccatagttatcacccagcaaagtggagatactaagggttgcattcactgctcctgcgattccatcgagtgcacctacaccctgctgaagaccctatgcggcctaagagacctgctaccaatgaattaaaaaatgattaataaaaaatcacttacttgaaatcagcaataaggtctctgttgaaattttctcccagcagcacctcacttccctcttcccaactctggtattctaaaccccgttcagcggcatactttctccatactttaaaggggatgtcaaattttagctcctctcctgtacccacaatcttcatgtctttcttcccagatgaccaagagagtccggctcagtgactccttcaaccctgtctacccctatgaagatgaaagcacctcccaacacccctttataaacccagggtttatttccccaaatggcttcacacaaagcccaaacggagttcttactttaaaatgtttaaccccactaacaaccacaggcggatctctacagctaaaagtgggagggggacttacagtggatgacaccaacggttttttgaaagaaaacataagtgccaccacaccactcgttaagactggtcactctataggtttaccactaggagccggattgggaacgaatgaaaataaactttgtatcaaattaggacaaggacttacattcaattcaaacaacatttgcattgatgacaatattaacaccttatggacaggagtcaaccccaccgaagccaactgtcaaatcatgaactccagtgaatctaatgattgcaaattaattctaacactagttaaaactggagcactagtcactgcatttgtttatgttataggagtatctaacaattttaatatgctaactacacacagaaatataaattttactgcagagctgtttttcgattctactggtaatttactaactagactctcatccctcaaaactccacttaatcataaatcaggacaaaacatggctactggtgccattactaatgctaaaggtttcatgcccagcacgactgcctatcctttcaatgataattctagagaaaaagaaaactacatttacggaacttgttactacacagctagtgatcgcactgcttttcccattgacatatctgtcatgcttaaccgaagagcaataaatgacgagacatcatattgtattcgtataacttggtcctggaacacaggagatgccccagaggtgcaaacctctgctacaaccctagtcacctccccatttaccttttactacatcagagaagacgactgacaaataaagtttgcgatcgccaggcccaccatgaagaaaagtggtgttcttttcctcttgggcatcatcttgctggttctgattggagtgcaaggaaccccagtagtgagaaagggtcgctgttcctgcatcagcaccaaccaagggactatccacctacaatccttgaaagaccttaaacaatttgccccaagcccttcctgcgagaaaattgaaatcattgctacactgaagaatggagttcaaacatgtctaaacccagattcagcagatgtgaaggaactgattaaaaagtgggagaaacaggtcagccaaaagaaaaagcaaaagaatgggaaaaaacatcaaaaaaagaaagttctgaaagttcgaaaatctcaacgttctcgtcaaaagaagactacaggaagcggagtgaaacagactttgaattttgaccttctcaagttggcgggagacgtggagtccaaccctggacctgccttgacctttgctttactggtggccctcctggtgctcagctgcaagtcaagctgctctgtgggctgtgatctgcctcaaacccacagcctgggtagcaggaggaccttgatgctcctggcacagatgaggagaatctctcttttctcctgcttgaaggacagacatgactttggatttccccaggaggagtttggcaaccagttccaaaaggctgaaaccatccctgtcctccatgagatgatccagcagatcttcaatctcttcagcacaaaggactcatctgctgcttgggatgagaccctcctagacaaattctacactgaactctaccagcagctgaatgacctggaagcctgtgtgatacagggggtgggggtgacagagactcccctgatgaaggaggactccattctggctgtgaggaaatacttccaaagaatcactctctatctgaaagagaagaaatacagcccttgtgcctgggaggttgtcagagcagaaatcatgagatctttttctttgtcaacaaacttgcaagaaagtttaagaagtaaggaaggaagcggacagtgtactaattatgctctcttgaaattggctggagatgttgagagcaaccctggacctgactggacctggcgcatcctgttcttggtggcagctgctacgggagctcattccaactgggtgaatgtaataagtgatttgaaaaaaattgaagatcttattcaatctatgcatattgatgctactttatatacggaaagtgatgttcaccccagttgcaaagtaacagcaatgaagtgctttctcttggagttacaagttatttcacttgagtccggagatgcaagtattcatgatacagtagaaaatctgatcatcctagcaaacaacagtttgtcttctaatgggaatgtaacagaatctggatgcaaagaatgtgaggaactggaggaaaaaaatattaaagaatttttgcagagttttgtacatattgtccaaatgttcatcaacacttctggaagcggagagggcagaggaagtctgctaacatgcggtgacgtcgaggagaatcctggacctatgtgtcaccagcagttggtcatctcttggttttccctggtttttctggcatctcccctcgtggccatatgggaactgaagaaagatgtttatgtcgtagaattggattggtatccggatgcccctggagaaatggtggtcctcacctgtgacacccctgaagaagatggtatcacctggaccttggaccagagcagtgaggtcttaggctctggcaaaaccctgaccatccaagtcaaagagtttggagatgctggccagtacacctgtcacaaaggaggcgaggttctaagccattcgctcctgctgcttcacaaaaaggaagatggaatttggtccactgatattttaaaggaccagaaagaacccaaaaataagacctttctaagatgcgaggccaagaattattctggacgtttcacctgctggtggctgacgacaatcagtactgatttgacattcagtgtcaaaagcagcagaggctcttctgacccccaaggggtgacgtgcggagctgctacactctctgcagagagagtcagaggggacaacaaggagtatgagtactcagtggagtgccaggaggacagtgcctgcccagctgctgaggagagtctgcccattgaggtcatggtggatgccgttcacaagctcaagtatgaaaactacaccagcagcttcttcatcagggacatcatcaaacctgacccacccaagaacttgcagctgaagccattaaagaattctcggcaggtggaggtcagctgggagtaccctgacacctggagtactccacattcctacttctccctgacattctgcgttcaggtccagggcaagagcaagagagaaaagaaagatagagtcttcacggacaagacctcagccacggtcatctgccgcaaaaatgccagcattagcgtgcgggcccaggaccgctactatagctcatcttggagcgaatgggcatctgtgccctgcagtggagggggcggcagcgggggaggcggcagcggcggcgggggatcgagaaacctccccgtggccactccagacccaggaatgttcccatgccttcaccactcccaaaacctgctgagggccgtcagcaacatgctccagaaggccagacaaactctagaattttacccttgcacttctgaagagattgatcatgaagatatcacaaaagataaaaccagcacagtggaggcctgtttaccattggaattaaccaagaatgagagttgcctaaattccagagagacctctttcataactaatgggagttgcctggcctccagaaagacctcttttatgatggccctgtgccttagtagtatttatgaagacttgaagatgtaccaggtggagttcaagaccatgaatgcaaagcttctgatggatcctaagaggcagatctttctagatcaaaacatgctggcagttattgatgagctgatgcaggccctgaatttcaacagtgagactgtgccacaaaaatcctcccttgaagaaccggatttttataaaactaaaatcaagctctgcatacttcttcatgctttcagaattcgggcagtgactattgatagagtgatgagctatctgaatgcttcctaagctagcttgactgactgagatacagcgtaccttcagctcacagacatgataagatacattgatgagtttggacaaaccacaactagaatgcagtgaaaaaaatgctttatttgtgaaatttgtgatgctattgctttatttgtaaccattataagctgcaataaacaagttaacaacaacaattgcattcattttatgtttcaggttcagggggaggtgtgggaggttttttaaagcaagtaaaacctctacaaatgtggtagtcgtcagctatcctgcaggaacttgtttatttgaaaatcaattcacaaaatccgagtagttattttgcctcccccttcccatttaacagaatacaccaatctctccccacgcacagctttaaacatttggataccattagatatagacatggttttagattccacattccaaacagtttcagagcgagccaatctggggtcagtgatagataaaaatccatcgggatagtcttttaaagcgctttcacagtccaactgctgcggatgcgactccggagtctggatcacggtcatctggaagaagaacgatgggaatcataatccgaaaacggtatcggacgattgtgtctcatcaaacccacaagcagccgctgtctgcgtcgctccgtgcgactgctgtttatgggatcagggtccacagtgtcctgaagcatgattttaatagcccttaacatcaactttctggtgcgatgcgcgcagcaacgcattctgatttcactcaaatctttgcagtaggtacaacacattattacaatattgtttaataaaccataattaaaagcgctccagccaaaactcatatctgatataatcgcccctgcatgaccatcataccaaagtttaatataaattaaatgacgttccctcaaaaacacactacccacatacatgatctcttttggcatgtgcatattaacaatctgtctgtaccatggacaacgttggttaatcatgcaacccaatataaccttccggaaccacactgccaacaccgctcccccagccatgcattgaagtgaaccctgctgattacaatgacaatgaagaacccaattctctcgaccgtgaatcacttgagaatgaaaaatatctatagtggcacaacatagacataaatgcatgcatcttctcataatttttaactcctcaggatttagaaacatatcccagggaataggaagctcttgcagaacagtaaagctggcagaacaaggaagaccacgaacacaacttacactatgcatagtcatagtatcacaatctggcaacagcgggtggtcttcagtcatagaagctcgggtttcattttcctcacaacgtggtaactgggctctggtgtaagggtgatgtctggcgcatgatgtcgagcgtgcgcgcaaccttgtcataatggagttgcttcctgacattctcgtattttgtatagcaaaacgcggccctggcagaacacactcttcttcgccttctatcctgccgcttagcgtgttccgtgtgatagttcaagtacaaccacactcttaagttggtcaaaagaatgctggcttcagttgtaatcaaaactccatcgcatctaatcgttctgaggaaatcatccaagcaatgcaactggattgtgtttcaagcaggagaggagagggaagagacggaagaaccatgttaatttttattccaaacgatctcgcagtacttcaaattgtagatcgcgcagatggcatctctcgcccccactgtgttggtgaaaaagcacagctagatcaaaagaaatgcgattttcaaggtgctcaacggtggcttccagcaaagcctccacgcgcacatccaagaacaaaagaataccaaaagaaggagcattttctaactcctcaatcatcatattacattcctgcaccattcccagataattttcagctttccagccttgaattattcgtgtcagttcttgtggtaaatccaatccacacattacaaacaggtcccggagggcgccctccaccaccattcttaaacacaccctcataatgacaaaatatcttgctcctgtgtcacctgtagcgaattgagaatggcaacatcaattgacatgcccttggctctaagttcttctttaagttctagttgtaaaaactctctcatattatcaccaaactgcttagccagaagccccccgggaacaagagcaggggacgctacagtgcagtacaagcgcagacctccccaattggctccagcaaaaacaagattggaataagcatattgggaaccgccagtaatatcatcgaagttgctggaaatataatcaggcagagtttcttgtaaaaattgaataaaagaaaaatttgccaaaaaaacattcaaaacctctgggatgcaaatgcaataggttaccgcgctgcgctccaacattgttagttttgaattagtctgcaaaaataaaaaaaaaaacaagcgtcatatcatagtagcctgacgaacagatggataaatcagtctttccatcacaagacaagccacagggtctccagctcgaccctcgtaaaacctgtcatcatgattaaacaacagcaccgaaagttcctcgcggtgaccagcatgaataattcttgatgaagcatacaatccagacatgttagcatcagttaacgagaaaaaacagccaacatagcctttgggtataattatgcttaatcgtaagtatagcaaagccacccctcgcggatacaaagtaaaaggcacaggagaataaaaaatataattatttctctgctgctgttcaggcaacgtcgcccccggtccctctaaatacacatacaaagcctcatcagccatggcttaccagacaaagtacagcgggcacacaaagcacaagctctaaagtgactctccaacctctccacaatatatatatacacaagccctaaactgacgtaatgggagtaaagtgtaaaaaatcccgccaaacccaacacacaccccgaaactgcgtcaccagggaaaagtacagtttcacttccgcaatcccaacaggcgtaacttcctctttctcacggtacgtgatatcccactaacttgcaacgtcattttcccacggtcgcaccgccccttttagccgttaaccccacagccaatcaccacacgatccacactttttaaaatcacctcatttacatattggcaccattccatctataaggtatattatatagataga

SEQ ID NO: 101 - DNA, 38650 bp, Artificial Sequence
  Genome sequence of NG-758 virus
tctatctatataatataccttatagatggaatggtgccaatatgtaaatgaggtgattttaaaaagtgtggatcgtgtggtgattggctgtggggttaacggctaaaaggggcggtgcgaccgtgggaaaatgacgttttgtgggggtggagtttttttgcaagttgtcgcgggaaatgtgacgcataaaaaggcttttttctcacggaactacttagttttcccacggtatttaacaggaaatgaggtagttttgaccggatgcaagtgaaaattgttgattttcgcgcgaaaactgaatgaggaagtgtttttctgaataatgtggtatttatggcagggtggagtatttgttcagggccaggtagactttgacccattacgtggaggtttcgattaccgtgttttttacctgaatttccgcgtaccgtgtcaaagtcttctgtttttacgtaggtgtcagctgatcgctagggtatttatacctcagggtttgtgtcaagaggccactcttgagtgccagcgagaagagttttctcctctgcgccggcagtttaataataaaaaaatgagagatttgcgatttctgcctcaggaaataatctctgctgagactggaaatgaaatattggagcttgtggtgcacgccctgatgggagacgatccggagccacctgtgcagctttttgagcctcctacgcttcaggaactgtatgatttagaggtagagggatcggaggattctaatgaggaagctgtaaatggcttttttaccgattctatgcttttagctgctaatgaagggttagaattagatccgcctttggacacttttgatactccaggggtaattgtggaaagcggtacaggtgtaagaaaattacctgatttgagttccgtggactgtgatttgcactgctatgaagacgggtttcctccgagtgatgaggaggaccatgaaaaggagcagtccatgcagactgcagcgggtgagggagtgaaggctgccaatgttggttttcagttggattgcccggagcttcctggacatggctgtaagtcttgtgaatttcacaggaaaaatactggagtaaaggaactgttatgttcgctttgttatatgagaacgcactgccactttatttacagtaagtgtgtttaagttaaaatttaaaggaatatgctgtttttcacatgtatattgagtgtgagttttgtgcttcttattataggtcctgtgtctgatgctgatgaatcaccatctcctgattctactacctcacctcctgagattcaagcacctgttcctgtggacgtgcgcaagcccattcctgtgaagcttaagcctgggaaacgtccagcagtggaaaaacttgaggacttgttacagggtggggacggacctttggacttgagtacacggaaacgtccaagacaataagtgttccatatccgtgtttacttaaggtgacgtcaatatttgtgtgacagtgcaatgtaataaaaatatgttaactgttcactggtttttattgctttttgggcggggactcaggtatataagtagaagcagacctgtgtggttagctcataggagctggctttcatccatggaggtttgggccattttggaagaccttaggaagactaggcaactgttagagaacgcttcggacggagtctccggtttttggagattctggttcgctagtgaattagctagggtagtttttaggataaaacaggactataaacaagaatttgaaaagttgttggtagattgcccaggactttttgaagctcttaatttgggccatcaggttcactttaaagaaaaagttttatcagttttagacttttcaaccccaggtagaactgctgctgctgtggcttttcttacttttatattagataaatggatcccgcagactcatttcagcaggggatacgttttggatttcatagccacagcattgtggagaacatggaaggttcgcaagatgaggacaatcttaggttactggccagtgcagcctttgggtgtagcgggaatcctgaggcatccaccggtcatgccagcggttctggaggaggaacagcaagaggacaacccgagagccggcctggaccctccagtggaggaggcggagtagctgacttgtctcctgaactgcaacgggtgcttactggatctacgtccactggacgggataggggcgttaagagggagagggcatctagtggtactgatgctagatctgagttggctttaagtttaatgagtcgcagacgtcctgaaaccatttggtggcatgaggttcagaaagagggaagggatgaagtttctgtattgcaggagaaatattcactggaacaggtgaaaacatgttggttggagcctgaggatgattgggaggtggccattaaaaattatgccaagatagctttgaggcctgataaacagtataagattactagacggattaatatccggaatgcttgttacatatctggaaatggggctgaggtggtaatagatactcaagacaaggcagttattagatgctgcatgatggatatgtggcctggggtagtcggtatggaagcagtaacttttgtaaatgttaagtttaggggagatggttataatggaatagtgtttatggccaataccaaacttatattgcatggttgtagcttttttggtttcaacaatacctgtgtagatgcctggggacaggttagtgtacggggatgtagtttctatgcgtgttggattgccacagctggcagaaccaagagtcaattgtctctgaagaaatgcatatttcaaagatgtaacctgggcattctgaatgaaggcgaagcaagggtccgccactgcgcttctacagatactggatgttttattttgattaagggaaatgccagcgtaaagcataacatgatttgcggtgcttccgatgagaggccttatcaaatgctcacttgtgctggtgggcattgtaatatgctggctactgtgcatattgtttcccatcaacgcaaaaaatggcctgtttttgatcacaatgtgatgacgaagtgtaccatgcatgcaggtgggcgtagaggaatgtttatgccttaccagtgtaacatgaatcatgtgaaagtgttgttggaaccagatgccttttccagaatgagcctaacaggaatttttgacatgaacatgcaaatctggaagatcctgaggtatgatgatacgagatcgagggtacgcgcatgcgaatgcggaggcaagcatgccaggttccagccggtgtgtgtagatgtgactgaagatctcagaccggatcatttggttattgcccgcactggagcagagttcggatccagtggagaagaaactgactaaggtgagtattgggaaaactttggggtgggattttcagatggacagattgagtaaaaatttgttttttctgtcttgcagctgtcatgagtggaaacgcttcttttaaggggggagtcttcagcccttatctgacagggcgtctcccatcctgggcaggagttcgtcagaatgttatgggatctactgtggatggaagacccgtccaacccgccaattcttcaacgctgacctatgctactttaagttcttcacctttggacgcagctgcagctgccgccgccgcttctgttgccgctaacactgtgcttggaatgggttactatggaagcatcatggctaattccacttcctctaataacccttctaccctgactcaggacaagttacttgtccttttggcccagctggaggctttgacccaacgtctgggtgaactttctcagcaggtggtcgagttgcgagtacaaactgagtctgctgtcggcacggcaaagtctaaataaaaaaatcccagaatcaatgaataaataaacaagcttgttgttgatttaaaatcaagtgtttttatttcatttttcgcgcacggtatgccctagaccaccgatctctatcattgagaactcggtggattttttccaggatcctatagaggtgggattgaatgtttagatacatgggcattaggccgtctttggggtggagatagctccattgaagggattcatgctccggggtagtgttgtaaatcacccagtcataacaaggtcgcagtgcatggtgttgcacaatatcttttagaagtaggctgattgccacagataagcccttggtgtaggtgtttacaaaccggttgagctgggatgggtgcattcggggtgaaattatgtgcattttggattggatttttaagttggcaatattgccgccaagatcccgtcttgggttcatgttatgaaggaccaccaagacggtgtatccggtacatttaggaaatttatcgtgcagcttggatggaaaagcgtggaaaaatttggagacacccttgtgtcctccaagattttccatgcactcatccatgataatagcaatggggccgtgggcagcggcgcgggcaaacacgttccgtgggtctgacacatcatagttatgttcctgagttaaatcatcataagccattttaatgaatttggggcggagagtaccagattggggtatgaatgttccttcgggccccggagcatagttcccctcacagatttgcatttcccaagctttcagttccgagggtggaatcatgtccacctggggggctatgaaaaacaccgtttctggggcgggggtgattaattgtgatgatagcaaatttctgagcaattgagatttgccacatccggtggggccataaatgattccgattacgggttgcaggtggtagtttagggaacggcaactgccgtcttctcgaagcaagggggccacctcgttcatcatttcccttacatgcatattttcccgcaccaaatccattaggaggcgctctcctcctagtgatagaagttcttgtagtgaggaaaagtttttcagcggtttcagaccgtcagccatgggcattttggagagagtttgctgcaaaagttctagtctgttccacagttcagtgatgtgttctatggcatctcgatccagcagacctcctcgtttcgcgggtttggacggctcctggaatagggtatgagacgatgggcgtccagcgctgccagggttcggtccttccagggtctcagtgttcgagtcagggttgtttccgtcacagtgaaggggtgtgcgcctgcttgggcgcttgccagggtgcgcttcagactcatcctgctggtcgaaaacttctgtcgcttggcgccctgtatgtcggccaagtagcagtttaccatgagttcgtagttgagcgcctcggctgcgtggcctttggcgcggagcttacctttggaagttttcttgcataccgggcagtataggcatttcagcgcatacaacttgggcgcaaggaaaacggattctggggagtatgcatctgcgccgcaggaggcgcaaacagtttcacattccaccagccaggttaaatccggttcattggggtcaaaaacaagttttccgccatattttttgatgcgtttcttacctttggtctccatgagttcgtgtcctcgttgagtgacaaacaggctgtccgtgtccccgtagactgattttacaggcctcttctccagtggagtgcctcggtcttcttcgtacaggaactctgaccactctgatacaaaggcgcgcgtccaggccagcacaaaggaggctatgtgggaggggtagcgatcgttgtcaaccagggggtccaccttttccaaagtatgcaaacacatgtcaccctcttcaacatccaggaatgtgattggcttgtaggtgtatttcacgtgacctggggtccccgctgggggggtataaaagggggcggttctttgctcttcctcactgtcttccggatcgctgtccaggaacgtcagctgttggggtaggtattccctctcgaaggcgggcatgacctctgcactcaggttgtcagtttctaagaacgaggaggatttgatattgacagtgccggttgagatgcctttcatgaggttttcgtccatctggtcagaaaacacaatttttttattgtcaagtttggtggcaaatgatccatacagggcgttggataaaagtttggcaatggatcgcatggtttggttcttttccttgtccgcgcgctctttggcggcgatgttgagttggacatactcgcgtgccaggcacttccattcggggaagatagttgttaattcatctggcacgattctcacttgccaccctcgattatgcaaggtaattaaatccacactggtggccacctcgcctcgaaggggttcattggtccaacagagcctacctcctttcctagaacagaaagggggaagtgggtctagcataagttcatcgggagggtctgcatccatggtaaagattcccggaagtaaatccttatcaaaatagctgatgggagtggggtcatctaaggccatttgccattctcgagctgccagtgcgcgctcatatgggttaaggggactgccccatggcatgggatgggtgagtgcagaggcatacatgccacagatgtcatagacgtagatgggatcctcaaagatgcctatgtaggttggatagcatcgcccccctctgatacttgctcgcacatagtcatatagttcatgtgatggcgctagcagccccggacccaagttggtgcgattgggtttttctgttctgtagacgatctggcgaaagatggcgtgagaattggaagagatggtgggtctttgaaaaatgttgaaatgggcatgaggtagacctacagagtctctgacaaagtgggcataagattcttgaagcttggttaccagttcggcggtgacaagtacgtctagggcgcagtagtcaagtgtttcttgaatgatgtcataacctggttggtttttcttttcccacagttcgcggttgagaaggtattcttcgcgatccttccagtactcttctagcggaaacccgtctttgtctgcacggtaagatcctagcatgtagaactgattaactgccttgtaagggcagcagcccttctctacgggtagagagtatgcttgagcagcttttcgtagcgaagcgtgagtaagggcaaaggtgtctctgaccatgactttgaggaattggtatttgaagtcgatgtcgtcacaggctccctgttcccagagttggaagtctacccgtttcttgtaggcggggttgggcaaagcgaaagtaacatcattgaagagaatcttgccggccctgggcatgaaattgcgagtgatgcgaaaaggctgtggtacttccgctcggttattgataacctgggcagctaggacgatctcgtcgaaaccgttgatgttgtgtcctacgatgtataattctatgaaacgcggcgtgcctctgacgtgaggtagcttactgagctcatcaaaggttaggtctgtggggtcagataaggcgtagtgttcgagagcccattcgtgcaggtgaggattcgctttaaggaaggaggaccagaggtccactgccagtgctgtttgtaactggtcccggtactgacgaaaatgccgtccgactgccattttttctggggtgacgcaatagaaggtttgggggtcctgccgccagcgatcccacttgagttttatggcgaggtcataggcgatgttgacgagccgctggtctccagagagtttcatgaccagcatgaaggggattagctgcttgccaaaggaccccatccaggtgtaggtttccacatcgtaggtgagaaagagcctttctgtgcgaggatgagagccaatcgggaagaactggatctcctgccaccagttggaggaatggctgttgatgtgatggaagtagaactccctgcgacgcgccgagcattcatgcttgtgcttgtacagacggccgcagtagtcgcagcgttgcacgggttgtatctcgtgaatgagttgtacctggcttcccttgacgagaaatttcagtgggaagccgaggcctggcgattgtatctcgtgctttactatgttgtctgcatcggcctgttcatcttctgtctcgatggtggtcatgctgacgagccctcgcgggaggcaagtccagacctcggcgcggcaggggcggagctcgaggacgagagcgcgcaggctggagctgtccagggtcctgagacgctgcggactcaggttagtaggcagtgtcaggagattaacttgcatgatcttttggagggcgtgcgggaggttcagatagtacttgatctcaacgggtccgttggtggagatgtcgatggcttgcagggttccgtgtcccttgggcgctaccaccgtgcccttgtttttcattttggacggcggtggctctgttgcttcttgcatgtttagaagcggtgtcgagggcgcgcaccgggcggcaggggcggctcgggacccggcggcatggctggcagtggtacgtcggcgccgcgcgcgggtaggttctggtactgcgccctgagaagactcgcatgcgcgacgacgcggcggttgacatcctggatctgacgcctctgggtgaaagctaccggccccgtgagcttgaacctgaaagagagttcaacagaatcaatctcggtatcgttgacggcggcttgcctaaggatttcttgcacgtcaccagagttgtcctggtaggcgatctccgccatgaactgctcgatctcttcctcttgaagatctccgcggcccgctctctcgacggtggccgcgaggtcgttggagatgcgcccaatgagttgagagaatgcattcatgcccgcctcgttccagacgcggctgtagaccacggcccccacgggatctctcgcgcgcatgaccacctgggcgaggttgagctccacgtggcgggtgaagaccgcatagttgcataggcgctggaaaaggtagttgagtgtggtggcgatgtgctcggtgacgaagaaatacatgatccatcgtctcagcggcatctcgctgacatcgcccagagcttccaagcgctccatggcctcgtagaagtccacggcaaaattaaaaaactgggagtttcgcgcggacacggtcaactcctcttccagaagacggataagttcggcgatggtggtgcgcacctcgcgctcgaaagcccctgggatttcttcctcaatctcttcttcttccactaacatctcttcctcttcaggtggggctgcaggaggagggggaacgcggcgacgccggcggcgcacgggcagacggtcgatgaatctttcaatgacctctccgcggcggcggcgcatggtttcagtgacggcgcggccgttctcgcgcggtcgcagagtaaaaacaccgccgcgcatctccttaaagtggtgactgggaggttctccgtttgggagggagagggcgctgattatacattttattaattggcccgtagggactgcacgcagagatctgatcgtgtcaagatccacgggatctgaaaacctttcgacgaaagcgtctaaccagtcacagtcacaaggtaggctgagtacggcttcttgtgggcgggggtggttatgtgttcggtctgggtcttctgtttcttcttcatctcgggaaggtgagacgatgctgctggtgatgaaattaaagtaggcagttctaagacggcggatggtggcgaggagcaccaggtctttgggtccggcttgctggatacgcaggcgattggccattccccaagcattatcctgacatctagcaagatctttgtagtagtcttgcatgagccgttctacgggcacttcttcctcacccgttctgccatgcatacgtgtgagtccaaatccgcgcattggttgtaccagtgccaagtcagctacgactctttcggcgaggatggcttgctgtacttgggtaagggtggcttgaaagtcatcaaaatccacaaagcggtggtaagctcctgtattaatggtgtaagcacagttggccatgactgaccagttaactgtctggtgaccagggcgcacgagctcggtgtatttaaggcgcgaataggcgcgggtgtcaaagatgtaatcgttgcaggtgcgcaccagatactggtaccctataagaaaatgcggcggtggttggcggtagagaggccatcgttctgtagctggagcgccaggggcgaggtcttccaacataaggcggtgatagccgtagatgtacctggacatccaggtgattcctgcggcggtagtagaagcccgaggaaactcgcgtacgcggttccaaatgttgcgtagcggcatgaagtagttcattgtaggcacggtttgaccagtgaggcgcgcgcagtcattgatgctctatagacacggagaaaatgaaagcgttcagcgactcgactccgtagcctggaggaacgtgaacgggttgggtcgcggtgtaccccggttcgagacttgtactcgagccggccggagccgcggctaacgtggtattggcactcccgtctcgacccagcctacaaaaatccaggatacggaatcgagtcgttttgctggtttccgaatggcagggaagtgagtcctattttttttttttgccgctcagatgcatcccgtgctgcgacagatgcgcccccaacaacagcccccctcgcagcagcagcagcagcaatcacaaaaggctgtccctgcaactactgcaactgccgccgtgagcggtgcgggacagcccgcctatgatctggacttggaagagggcgaaggactggcacgtctaggtgcgccttcacccgagcggcatccgcgagttcaactgaaaaaagattctcgcgaggcgtatgtgccccaacagaacctatttagagacagaagcggcgaggagccggaggagatgcgagcttcccgctttaacgcgggtcgtgagctgcgtcacggtttggaccgaagacgagtgttgcgggacgaggatttcgaagttgatgaaatgacagggatcagtcctgccagggcacacgtggctgcagccaaccttgtatcggcttacgagcagacagtaaaggaagagcgtaacttccaaaagtcttttaataatcatgtgcgaaccctgattgcccgcgaagaagttacccttggtttgatgcatttgtgggatttgatggaagctatcattcagaaccctactagcaaacctctgaccgcccagctgtttctggtggtgcaacacagcagagacaatgaggctttcagagaggcgctgctgaacatcaccgaacccgaggggagatggttgtatgatcttatcaacattctacagagtatcatagtgcaggagcggagcctgggcctggccgagaaggtggctgccatcaattactcggttttgagcttgggaaaatattacgctcgcaaaatctacaagactccatacgttcccatagacaaggaggtgaagatagatgggttctacatgcgcatgacgctcaaggtcttgaccctgagcgatgatcttggggtgtatcgcaatgacagaatgcatcgcgcggttagcgccagcaggaggcgcgagttaagcgacagggaactgatgcacagtttgcaaagagctctgactggagctggaaccgagggtgagaattacttcgacatgggagctgacttgcagtggcagcctagtcgcagggctctgagcgccgcgacggcaggatgtgagcttccttacatagaagaggcggatgaaggcgaggaggaagagggcgagtacttggaagactgatggcacaacccgtgttttttgctagatggaacagcaagcaccggatcccgcaatgcgggcggcgctgcagagccagccgtccggcattaactcctcggacgattggacccaggccatgcaacgtatcatggcgttgacgactcgcaaccccgaagcctttagacagcaaccccaggccaaccgtctatcggccatcatggaagctgtagtgccttcccgctctaatcccactcatgagaaggtcctggccatcgtgaacgcgttggtggagaacaaagctattcgtccagatgaggccggactggtatacaacgctctcttagaacgcgtggctcgctacaacagtagcaatgtgcaaaccaatttggaccgtatgataacagatgtacgcgaagccgtgtctcagcgcgaaaggttccagcgtgatgccaacctgggttcgctggtggcgttaaatgctttcttgagtactcagcctgctaatgtgccgcgtggtcaacaggattatactaactttttaagtgctttgagactgatggtatcagaagtacctcagagcgaagtgtatcagtccggtcctgattacttctttcagactagcagacagggcttgcagacggtaaatctgagccaagcttttaaaaaccttaaaggtttgtggggagtgcatgccccggtaggagaaagagcaaccgtgtctagcttgttaactccgaactcccgcctattattactgttggtagctcctttcaccgacagcggtagcatcgaccgtaattcctatttgggttacctactaaacctgtatcgcgaagccatagggcaaagtcaggtggacgagcagacctatcaagaaattacccaagtcagtcgcgctttgggacaggaagacactggcagtttggaagccactctgaacttcttgcttaccaatcggtctcaaaagatccctcctcaatatgctcttactgcggaggaggagaggatccttagatatgtgcagcagagcgtgggattgtttctgatgcaagagggggcaactccgactgcagcactggacatgacagcgcgaaatatggagcccagcatgtatgccagtaaccgacctttcattaacaaactgctggactacttgcacagagctgccgctatgaactctgattatttcaccaatgccatcttaaacccgcactggctgcccccacctggtttctacacgggcgaatatgacatgcccgaccctaatgacggatttctgtgggacgacgtggacagcgatgttttttcacctctttctgatcatcgcacgtggaaaaaggaaggcggcgatagaatgcattcttctgcatcgctgtccggggtcatgggtgctaccgcggctgagcccgagtctgcaagtccttttcctagtctacccttttctctacacagtgtacgtagcagcgaagtgggtagaataagtcgcccgagtttaatgggcgaagaggagtatctaaacgattccttgctcagaccggcaagagaaaaaaatttcccaaacaatggaatagaaagtttggtggataaaatgagtagatggaagacttatgctcaggatcacagagacgagcctgggatcatggggattacaagtagagcgagccgtagacgccagcgccatgacagacagaggggtcttgtgtgggacgatgaggattcggccgatgatagcagcgtgctggacttgggtgggagaggaaggggcaacccgtttgctcatttgcgccctcgcttgggtggtatgttgtaaaaaaaaataaaaaaaaaactcaccaaggccatggcgacgagcgtacgttcgttcttctttattatctgtgtctagtataatgaggcgagtcgtgctaggcggagcggtggtgtatccggagggtcctcctccttcgtacgagagcgtgatgcagcagcagcaggcgacggcggtgatgcaatccccactggaggctccctttgtgcctccgcgatacctggcacctacggagggcagaaacagcattcgttattcggaactggcacctcagtacgataccaccaggttgtatctggtggacaacaagtcggcggacattgcttctctgaactatcagaatgaccacagcaacttcttgaccacggtggtgcaaaacaatgactttacccctacggaagccagcacccagaccattaactttgatgaacgatcgcggtggggcggtcagctaaagaccatcatgcatactaacatgccaaacgtgaacgagtatatgtttagtaacaagttcaaagcgcgtgtgatggtgtccagaaaacctcccgacggtgctgcagttggggatacttatgatcacaagcaggatattttgaaatatgagtggttcgagtttactttgccagaaggcaacttttcagttactatgactattgatttgatgaacaatgccatcatagataattacttgaaagtgggtagacagaatggagtgcttgaaagtgacattggtgttaagttcgacaccaggaacttcaagctgggatgggatcccgaaaccaagttgatcatgcctggagtgtatacgtatgaagccttccatcctgacattgtcttactgcctggctgcggagtggattttaccgagagtcgtttgagcaaccttcttggtatcagaaaaaaacagccatttcaagagggttttaagattttgtatgaagatttagaaggtggtaatattccggccctcttggatgtagatgcctatgagaacagtaagaaagaacaaaaagccaaaatagaagctgctacagctgctgcagaagctaaggcaaacatagttgccagcgactctacaagggttgctaacgctggagaggtcagaggagacaattttgcgccaacacctgttccgactgcagaatcattattggccgatgtgtctgaaggaacggacgtgaaactcactattcaacctgtagaaaaagatagtaagaatagaagctataatgtgttggaagacaaaatcaacacagcctatcgcagttggtatctttcgtacaattatggcgatcccgaaaaaggagtgcgttcctggacattgctcaccacctcagatgtcacctgcggagcagagcaggtctactggtcgcttccagacatgatgaaggatcctgtcactttccgctccactagacaagtcagtaactaccctgtggtgggtgcagagcttatgcccgtcttctcaaagagcttctacaacgaacaagctgtgtactcccagcagctccgccagtccacctcgcttacgcacgtcttcaaccgctttcctgagaaccagattttaatccgtccgccggcgcccaccattaccaccgtcagtgaaaacgttcctgctctcacagatcacgggaccctgccgttgcgcagcagtatccggggagtccaacgtgtgaccgttactgacgccagacgccgcacctgtccctacgtgtacaaggcactgggcatagtcgcaccgcgcgtcctttcaagccgcactttctaaaaaaaaaaaaaatgtccattcttatctcgcccagtaataacaccggttggggtctgcgcgctccaagcaagatgtacggaggcgcacgcaaacgttctacccaacatcctgtccgtgttcgcggacattttcgcgctccatggggcgccctcaagggccgcactcgcgttcgaaccaccgtcgatgatgtaatcgatcaggtggttgccgacgcccgtaattatactcctactgcgcctacatctactgtggatgcagttattgacagtgtagtggctgacgctcgcaactatgctcgacgtaagagccggcgaaggcgcattgccagacgccaccgagctaccactgccatgcgagccgcaagagctctgctacgaagagctagacgcgtggggcgaagagccatgcttagggcggccagacgtgcagcttcgggcgccagcgccggcaggtcccgcaggcaagcagccgctgtcgcagcggcgactattgccgacatggcccaatcgcgaagaggcaatgtatactgggtgcgtgacgctgccaccggtcaacgtgtacccgtgcgcacccgtccccctcgcacttagaagatactgagcagtctccgatgttgtgtcccagcggcgaggatgtccaagcgcaaatacaaggaagaaatgctgcaggttatcgcacctgaagtctacggccaaccgttgaaggatgaaaaaaaaccccgcaaaatcaagcgggttaaaaaggacaaaaaagaagaggaagatggcgatgatgggctggcggagtttgtgcgcgagtttgccccacggcgacgcgtgcaatggcgtgggcgcaaagttcgacatgtgttgagacctggaacttcggtggtctttacacccggcgagcgttcaagcgctacttttaagcgttcctatgatgaggtgtacggggatgatgatattcttgagcaggcggctgaccgattaggcgagtttgcttatggcaagcgtagtagaataacttccaaggatgagacagtgtcgatacccttggatcatggaaatcccacccctagtcttaaaccggtcactttgcagcaagtgttacccgtaactccgcgaacaggtgttaaacgcgaaggtgaagatttgtatcccactatgcaactgatggtacccaaacgccagaagttggaggacgttttggagaaagtaaaagtggatccagatattcaacctgaggttaaagtgagacccattaagcaggtagcgcctggtctgggggtacaaactgtagacattaagattcccactgaaagtatggaagtgcaaactgaacccgcaaagcctactgccacctccactgaagtgcaaacggatccatggatgcccatgcctattacaactgacgccgccggtcccactcgaagatcccgacgaaagtacggtccagcaagtctgttgatgcccaattatgttgtacacccatctattattcctactcctggttaccgaggcactcgctactatcgcagccgaaacagtacctcccgccgtcgccgcaagacacctgcaaatcgcagtcgtcgccgtagacgcacaagcaaaccgactcccggcgccctggtgcggcaagtgtaccgcaatggtagtgcggaacctttgacactgccgcgtgcgcgttaccatccgagtatcatcacttaatcaatgttgccgctgcctccttgcagatatggccctcacttgtcgccttcgcgttcccatcactggttaccgaggaagaaactcgcgccgtagaagagggatgttgggacgcggaatgcgacgctacaggcgacggcgtgctatccgcaagcaattgcggggtggttttttaccagccttaattccaattatcgctgctgcaattggcgcgataccaggcatagcttccgtggcggttcaggcctcgcaacgacattgacattggaaaaaaacgtataaataaaaaaaaaaaaatacaatggactctgacactcctggtcctgtgactatgttttcttagagatggaagacatcaatttttcatccttggctccgcgacacggcacgaagccgtacatgggcacctggagcgacatcggcacgagccaactgaacgggggcgccttcaattggagcagtatctggagcgggcttaaaaattttggctcaaccataaaaacatacgggaacaaagcttggaacagcagtacaggacaggcgcttagaaataaacttaaagaccagaacttccaacaaaaagtagtcgatgggatagcttccggcatcaatggagtggtagatttggctaaccaggctgtgcagaaaaagataaacagtcgtttggacccgccgccagcaaccccaggtgaaatgcaagtggaggaagaaattcctccgccagaaaaacgaggcgacaagcgtccgcgtcccgatttggaagagacgctggtgacgcgcgtagatgaaccgccttcttatgaggaagcaacgaagcttggaatgcccaccactagaccgatagccccaatggccaccggggtgatgaaaccttctcagttgcatcgacccgtcaccttggatttgccccctccccctgctgctactgctgtacccgcttctaagcctgtcgctgccccgaaaccagtcgccgtagccaggtcacgtcccgggggcgctcctcgtccaaatgcgcactggcaaaatactctgaacagcatcgtgggtctaggcgtgcaaagtgtaaaacgccgtcgctgcttttaattaaatatggagtagcgcttaacttgcctatctgtgtatatgtgtcattacacgccgtcacagcagcagaggaaaaaaggaagaggtcgtgcgtcgacgctgagttactttcaagatggccaccccatcgatgctgccccaatgggcatacatgcacatcgccggacaggatgcttcggagtacctgagtccgggtctggtgcagttcgcccgcgccacagacacctacttcaatctgggaaataagtttagaaatcccaccgtagcgccgacccacgatgtgaccaccgaccgtagccagcggctcatgttgcgcttcgtgcccgttgaccgggaggacaatacatactcttacaaagtgcggtacaccctggccgtgggcgacaacagagtgctggatatggccagcacgttctttgacattaggggtgtgttggacagaggtcccagtttcaaaccctattctggtacggcttacaactccctggctcctaaaggcgctccaaatacatctcagtggattgcagaaggtgtaaaaaatacaactggtgaggaacacgtaacagaagaggaaaccaatactactacttacacttttggcaatgctcctgtaaaagctgaagctgaaattacaaaagaaggactcccagtaggtttggaagtttcagatgaagaaagtaaaccgatttatgctgataaaacatatcagccagaacctcagctgggagatgaaacttggactgaccttgatggaaaaaccgaaaagtatggaggcagggctctcaaacccgatactaagatgaaaccatgctacgggtcctttgccaaacctactaatgtgaaaggcggtcaggcaaaacaaaaaacaacggagcagccaaatcagaaagtcgaatatgatatcgacatggagttttttgatgcggcatcgcagaaaacaaacttaagtcctaaaattgtcatgtatgcagaaaatgtaaatttggaaactccagacactcatgtagtgtacaaacctggaacagaagacacaagttccgaagctaatttgggacaacaatctatgcccaacagacccaactacattggcttcagagataactttattggacttatgtactataacagtactggtaacatgggggtgctggctggtcaagcgtctcagttaaatgcagtggttgacttgcaggacagaaacacagaactttcttaccaactcttgcttgactctctgggcgacagaaccagatactttagcatgtggaatcaggctgtggacagttatgatcctgatgtacgtgttattgaaaatcatggtgtggaagatgaacttcccaactactgttttccactggacggcataggtgttccaacaaccagttacaaatcaatagttccaaatggagacaatgcgcctaattggaaggaacctgaagtaaatggaacaagtgagatcggacagggtaatttgtttgccatggaaattaaccttcaagccaatctatggcgaagtttcctttattccaatgtggctctatatctcccagactcgtacaaatacaccccgtccaatgtcactcttccagaaaacaaaaacacctacgactacatgaacgggcgggtggtgccgccatctctagtagacacctatgtgaacattggtgccaggtggtctctggatgccatggacaatgtcaacccattcaaccaccaccgtaacgctggcttgcgttaccgatccatgcttctgggtaacggacgttatgtgcctttccacatacaagtgcctcaaaaattcttcgctgttaaaaacctgctgcttctcccaggctcctacacttatgagtggaactttaggaaggatgtgaacatggttctacagagttccctcggtaacgacctgcgggtagatggcgccagcatcagtttcacgagcatcaacctctatgctacttttttccccatggctcacaacaccgcttccacccttgaagccatgctgcggaatgacaccaatgatcagtcattcaacgactacctatctgcagctaacatgctctaccccattcctgccaatgcaaccaatattcccatttccattccttctcgcaactgggcggctttcagaggctggtcatttaccagactgaaaaccaaagaaactccctctttggggtctggatttgacccctactttgtctattctggttctattccctacctggatggtaccttctacctgaaccacacttttaagaaggtttccatcatgtttgactcttcagtgagctggcctggaaatgacaggttactatctcctaacgaatttgaaataaagcgcactgtggatggcgaaggctacaacgtagcccaatgcaacatgaccaaagactggttcttggtacagatgctcgccaactacaacatcggctatcagggcttctacattccagaaggatacaaagatcgcatgtattcatttttcagaaacttccagcccatgagcaggcaggtggttgatgaggtcaattacaaagacttcaaggccgtcgccataccctaccaacacaacaactctggctttgtgggttacatggctccgaccatgcgccaaggtcaaccctatcccgctaactatccctatccactcattggaacaactgccgtaaatagtgttacgcagaaaaagttcttgtgtgacagaaccatgtggcgcataccgttctcgagcaacttcatgtctatgggggcccttacagacttgggacagaatatgctctatgccaactcagctcatgctctggacatgacctttgaggtggatcccatggatgagcccaccctgctttatcttctcttcgaagttttcgacgtggtcagagtgcatcagccacaccgcggcatcatcgaggcagtctacctgcgtacaccgttctcggccggtaacgctaccacgtaagaagcttcttgcttcttgcaaatagcagctgcaaccatggcctgcggatcccaaaacggctccagcgagcaagagctcagagccattgtccaagacctgggttgcggaccctattttttgggaacctacgataagcgcttcccggggttcatggcccccgataagctcgcctgtgccattgtaaatacggccggacgtgagacggggggagagcactggttggctttcggttggaacccacgttctaacacctgctacctttttgatccttttggattctcggatgatcgtctcaaacagatttaccagtttgaatatgagggtctcctgcgccgcagcgctcttgctaccaaggaccgctgtattacgctggaaaaatctacccagaccgtgcagggtccccgttctgccgcctgcggacttttctgctgcatgttccttcacgcctttgtgcactggcctgaccgtcccatggacggaaaccccaccatgaaattgctaactggagtgccaaacaacatgcttcattctcctaaagtccagcccaccctgtgtgacaatcaaaaagcactctaccattttcttaatacccattcgccttattttcgctcccatcgtacacacatcgaaagggccactgcgttcgaccgtatggatgttcaataatgactcatgtaaacaacgtgttcaataaacatcactttatttttttacatgtatcaaggctctgcattacttatttatttacaagtcgaatgggttctgacgagaatcagaatgacccgcaggcagtgatacgttgcggaactgatacttgggttgccacttgaattcgggaatcaccaacttgggaaccggtatatcgggcaggatgtcactccacagctttctggtcagctgcaaagctccaagcaggtcaggagccgaaatcttgaaatcacaattaggaccagtgctttgagcgcgagagttgcggtacaccggattgcagcactgaaacaccatcagcgacggatgtctcacgcttgccagcacggtgggatctgcaatcatgcccacatccagatcttcagcattggcaatgctgaacggggtcatcttgcaggtctgcctacccatggcgggcacccaattaggcttgtggttgcaatcgcagtgcagggggatcagtatcatcttggcctgatcctgtctgattcctggatacacggctctcatgaaagcatcatattgcttgaaagcctgctgggctttactaccctcggtataaaacatcccgcaggacctgctcgaaaactggttagctgcacagccggcatcattcacacagcagcgggcgtcattgttagctatttgcaccacacttctgccccagcggttttgggtgattttggttcgctcgggattctcctttaaggctcgttgtccgttctcgctggccacatccatctcgataatctgctccttctgaatcataatattgccatgcaggcacttcagcttgccctcataatcattgcagccatgaggccacaacgcacagcctgtacattcccaattatggtgggcgatctgagaaaaagaatgtatcattccctgcagaaatcttcccatcatcgtgctcagtgtcttgtgactagtgaaagttaactggatgcctcggtgctcctcgtttacgtactggtgacagatgcgcttgtattgttcgtgttgctcaggcattagtttaaaagaggttctaagttcgttatccagcctgtacttctccatcagcagacacatcacttccatgcctttctcccaagcagacaccaggggcaagctaatcggattcttaacagtgcaggcagcagctcctttagccagagggtcatctttagcgatcttctcaatgcttcttttgccatccttctcaacgatgcgcacgggcgggtagctgaaacccactgctacaagttgcgcctcttctctttcttcttcgctgtcttgactgatgtcttgcatggggatatgtttggtcttccttggcttctttttggggggtatcggaggaggaggactgtcgctccgttccggagacagggaggattgtgacgtttcgctcaccattaccaactgactgtcggtagaagaacctgaccccacacggcgacaggtgtttctcttcgggggcagaggtggaggcgattgcgaagggctgcggtccgacctggaaggcggatgactggcagaaccccttccgcgttcgggggtgtgctccctgtggcggtcgcttaactgatttccttcgcggctggccattgtgttctcctaggcagagaaacaacagacatggaaactcagccattgctgtcaacatcgccacgagtgccatcacatctcgtcctcagcgacgaggaaaaggagcagagcttaagcattccaccgcccagtcctgccaccacctctaccctagaagataaggaggtcgacgcatctcatgacatgcagaataaaaaagcgaaagagtctgagacagacatcgagcaagacccgggctatgtgacaccggtggaacacgaggaagagttgaaacgctttctagagagagaggatgaaaactgcccaaaacaacgagcagataactatcaccaagatgctggaaatagggatcagaacaccgactacctcatagggcttgacggggaagacgcgctccttaaacatctagcaagacagtcgctcatagtcaaggatgcattattggacagaactgaagtgcccatcagtgtggaagagctcagccgcgcctacgagcttaacctcttttcacctcgtactccccccaaacgtcagccaaacggcacctgcgagccaaatcctcgcttaaacttttatccagcttttgctgtgccagaagtactggctacctatcacatcttttttaaaaatcaaaaaattccagtctcctgccgcgctaatcgcacccgcgccgatgccctactcaatctgggacctggttcacgcttacctgatatagcttccttggaagaggttccaaagatcttcgagggtctgggcaataatgagactcgggccgcaaatgctctgcaaaagggagaaaatggcatggatgagcatcacagcgttctggtggaattggaaggcgataatgccagactcgcagtactcaagcgaagcatcgaggtcacacacttcgcatatcccgctgtcaacctgccccctaaagtcatgacggcggtcatggaccagttactcattaagcgcgcaagtcccctttcagaagacatgcatgacccagatgcctgtgatgagggtaaaccagtggtcagtgatgagcagctaacccgatggctgggcaccgactctcccagggatttggaagagcgtcgcaagcttatgatggccgtggtgctggttaccgtagaactagagtgtctccgacgtttctttaccgattcagaaaccttgcgcaaactcgaagagaatctgcactacacttttagacacggctttgtgcggcaggcatgcaagatatctaacgtggaactcaccaacctggtttcctacatgggtattctgcatgagaatcgcctaggacaaagcgtgctgcacagcaccctgaagggggaagcccgccgtgattacatccgcgattgtgtctatctgtacctgtgccacacgtggcaaaccggcatgggtgtatggcagcaatgtttagaagaacagaacttgaaagagcttgacaagctcttacagaaatctcttaaggttctgtggacagggttcgacgagcgcaccgtcgcttccgacctggcagacctcatcttcccagagcgtctcagggttactttgcgaaacggattgcctgactttatgagccagagcatgcttaacaattttcgctctttcatcctggaacgctccggtatcctgcccgccacctgctgcgcactgccctccgactttgtgcctctcacctaccgcgagtgccccccgccgctatggagtcactgctacctgttccgtctggccaactatctctcctaccactcggatgtgatcgaggatgtgagcggagacggcttgctggagtgtcactgccgctgcaatctgtgcacgccccaccggtccctagcttgcaacccccagttgatgagcgaaacccagataataggcacctttgaattgcaaggccccagcagccaaggcgatgggtcttctcctgggcaaagtttaaaactgaccccgggactgtggacctccgcctacttgcgcaagtttgctccggaagattaccacccctatgaaatcaagttctatgaggaccaatcacagcctccaaaggccgaactttcggcctgcgtcatcacccagggggcaattctggcccaattgcaagccatccaaaaatcccgccaagaatttctactgaaaaagggtaagggggtctaccttgacccccagaccggcgaggaactcaacacaaggttccctcaggatgtcccaacgacgagaaaacaagaagttgaaggtgcagccgccgcccccagaagatatggaggaagattgggacagtcaggcagaggaggcggaggaggacagtctggaggacagtctggaggaagacagtttggaggaggaaaacgaggaggcagaggaggtggaagaagtaaccgccgacaaacagttatcctcggctgcggagacaagcaacagcgctaccatctccgctccgagtcgaggaacccggcggcgtcccagcagtagatgggacgagaccggacgcttcccgaacccaaccagcgcttccaagaccggtaagaaggatcggcagggatacaagtcctggcgggggcataagaatgccatcatctcctgcttgcatgagtgcgggggcaacatatccttcacgcggcgctacttgctattccaccatggggtgaactttccgcgcaatgttttgcattactaccgtcacctccacagcccctactatagccagcaaatcccggcagtctcgacagataaagacagcggcggcgacctccaacagaaaaccagcagcggcagttagaaaatacacaacaagtgcagcaacaggaggattaaagattacagccaacgagccagcgcaaacccgagagttaagaaatcggatctttccaaccctgtatgccatcttccagcagagtcggggtcaagagcaggaactgaaaataaaaaaccgatctctgcgttcgctcaccagaagttgtttgtatcacaagagcgaagatcaacttcagcgcactctcgaggacgccgaggctctcttcaacaagtactgcgcgctgactcttaaagagtaggcagcgaccgcgcttattcaaaaaaggcgggaattacatcatcctcgacatgagtaaagaaattcccacgccttacatgtggagttatcaaccccaaatgggattggcggcaggcgcctcccaggactactccacccgcatgaattggctcagcgccgggccttctatgatttctcgagttaatgatatacgcgcctaccgaaaccaaatacttttggaacagtcagctcttaccaccacgccccgccaacaccttaatcccagaaattggcccgccgccctagtgtaccaggaaagtcccgctcccaccactgtattacttcctcgagacgcccaggccgaagtccaaatgactaatgcaggtgcgcagttagctggcggctccaccctatgtcgtcacaggcctcggcataatataaaacgcctgatgatcagaggccgaggtatccagctcaacgacgagtcggtgagctctccgcttggtctacgaccagacggaatctttcagattgccggctgcgggagatcttccttcacccctcgtcaggctgttctgactttggaaagttcgtcttcgcaaccccgctcgggcggaatcgggaccgttcaatttgtggaggagtttactccctctgtctacttcaaccccttctccggatctcctgggcattacccggacgagttcataccgaacttcgacgcgattagcgagtcagtggacggctacgattgatgtctggtgacgcggctgagctatctcggctgcgacatctagaccactgccgccgctttcgctgctttgcccgggaactcattgagttcatctacttcgaactccccaaggatcaccctcaaggtccggcccacggagtgcggatttctatcgaaggcaaaatagactctcgcctgcaacgaattttctcccagcggcccgtgctgatcgagcgagaccagggaaacaccacggtttccatctactgcatttgtaatcaccccggattgcatgaaagcctttgctgtcttatgtgtactgagtttaataaaaactgaattaagactctcctacggactgccgcttcttcaacccggattttacaaccagaagaacgaaacttttcctgtcgtccaggactctgttaacttcacctttcctactcacaaactagaagctcaacgactacaccgcttttccagaagcattttccctactaatactactttcaaaaccggaggtgagctccaaggtcttcctacagaaaacccttgggtggaagcgggccttgtagtgctaggaattcttgcgggtgggcttgtgattattctttgctacctatacacaccttgcttcactttcttagtggtgttgtggtattggtttaaaaaatggggcccatactagtcttgcttgttttactttcgcttttggaaccgggttctgccaattacgatccatgtctagacttcgacccagaaaactgcacacttacttttgcacccgacacaagccgcatctgtggagttcatcgcctctcttacgaacttggcccccaacgacaaaaatttacctgcatggtgggaatcaaccccatagttatcacccagcaaagtggagatactaagggttgcattcactgctcctgcgattccatcgagtgcacctacaccctgctgaagaccctatgcggcctaagagacctgctaccaatgaattaaaaaatgattaataaaaaatcacttacttgaaatcagcaataaggtctctgttgaaattttctcccagcagcacctcacttccctcttcccaactctggtattctaaaccccgttcagcggcatactttctccatactttaaaggggatgtcaaattttagctcctctcctgtacccacaatcttcatgtctttcttcccagatgaccaagagagtccggctcagtgactccttcaaccctgtctacccctatgaagatgaaagcacctcccaacacccctttataaacccagggtttatttccccaaatggcttcacacaaagcccaaacggagttcttactttaaaatgtttaaccccactaacaaccacaggcggatctctacagctaaaagtgggagggggacttacagtggatgacaccaacggttttttgaaagaaaacataagtgccaccacaccactcgttaagactggtcactctataggtttaccactaggagccggattgggaacgaatgaaaataaactttgtatcaaattaggacaaggacttacattcaattcaaacaacatttgcattgatgacaatattaacaccttatggacaggagtcaaccccaccgaagccaactgtcaaatcatgaactccagtgaatctaatgattgcaaattaattctaacactagttaaaactggagcactagtcactgcatttgtttatgttataggagtatctaacaattttaatatgctaactacacacagaaatataaattttactgcagagctgtttttcgattctactggtaatttactaactagactctcatccctcaaaactccacttaatcataaatcaggacaaaacatggctactggtgccattactaatgctaaaggtttcatgcccagcacgactgcctatcctttcaatgataattctagagaaaaagaaaactacatttacggaacttgttactacacagctagtgatcgcactgcttttcccattgacatatctgtcatgcttaaccgaagagcaataaatgacgagacatcatattgtattcgtataacttggtcctggaacacaggagatgccccagaggtgcaaacctctgctacaaccctagtcacctccccatttaccttttactacatcagagaagacgactgacaaataaagtttgcgatcgccaggcccaccatgaagaaaagtggtgttcttttcctcttgggcatcatcttgctggttctgattggagtgcaaggaaccccagtagtgagaaagggtcgctgttcctgcatcagcaccaaccaagggactatccacctacaatccttgaaagaccttaaacaatttgccccaagcccttcctgcgagaaaattgaaatcattgctacactgaagaatggagttcaaacatgtctaaacccagattcagcagatgtgaaggaactgattaaaaagtgggagaaacaggtcagccaaaagaaaaagcaaaagaatgggaaaaaacatcaaaaaaagaaagttctgaaagttcgaaaatctcaacgttctcgtcaaaagaagactacaggaagcggagtgaaacagactttgaattttgaccttctcaagttggcgggagacgtggagtccaaccctggacctgccttgacctttgctttactggtggccctcctggtgctcagctgcaagtcaagctgctctgtgggctgtgatctgcctcaaacccacagcctgggtagcaggaggaccttgatgctcctggcacagatgaggagaatctctcttttctcctgcttgaaggacagacatgactttggatttccccaggaggagtttggcaaccagttccaaaaggctgaaaccatccctgtcctccatgagatgatccagcagatcttcaatctcttcagcacaaaggactcatctgctgcttgggatgagaccctcctagacaaattctacactgaactctaccagcagctgaatgacctggaagcctgtgtgatacagggggtgggggtgacagagactcccctgatgaaggaggactccattctggctgtgaggaaatacttccaaagaatcactctctatctgaaagagaagaaatacagcccttgtgcctgggaggttgtcagagcagaaatcatgagatctttttctttgtcaacaaacttgcaagaaagtttaagaagtaaggaaggaagcggacagtgtactaattatgctctcttgaaattggctggagatgttgagagcaaccctggacctgactggacctggcgcatcctgttcttggtggcagctgctacgggagctcattccaactgggtgaatgtaataagtgatttgaaaaaaattgaagatcttattcaatctatgcatattgatgctactttatatacggaaagtgatgttcaccccagttgcaaagtaacagcaatgaagtgctttctcttggagttacaagttatttcacttgagtccggagatgcaagtattcatgatacagtagaaaatctgatcatcctagcaaacaacagtttgtcttctaatgggaatgtaacagaatctggatgcaaagaatgtgaggaactggaggaaaaaaatattaaagaatttttgcagagttttgtacatattgtccaaatgttcatcaacacttctggaagcggagctactaacttcagcctgctgaagcaggctggagacgtggaggagaaccctggacctatgtgtcaccagcagttggtcatctcttggttttccctggtttttctggcatctcccctcgtggccatatgggaactgaagaaagatgtttatgtcgtagaattggattggtatccggatgcccctggagaaatggtggtcctcacctgtgacacccctgaagaagatggtatcacctggaccttggaccagagcagtgaggtcttaggctctggcaaaaccctgaccatccaagtcaaagagtttggagatgctggccagtacacctgtcacaaaggaggcgaggttctaagccattcgctcctgctgcttcacaaaaaggaagatggaatttggtccactgatattttaaaggaccagaaagaacccaaaaataagacctttctaagatgcgaggccaagaattattctggacgtttcacctgctggtggctgacgacaatcagtactgatttgacattcagtgtcaaaagcagcagaggctcttctgacccccaaggggtgacgtgcggagctgctacactctctgcagagagagtcagaggggacaacaaggagtatgagtactcagtggagtgccaggaggacagtgcctgcccagctgctgaggagagtctgcccattgaggtcatggtggatgccgttcacaagctcaagtatgaaaactacaccagcagcttcttcatcagggacatcatcaaacctgacccacccaagaacttgcagctgaagccattaaagaattctcggcaggtggaggtcagctgggagtaccctgacacctggagtactccacattcctacttctccctgacattctgcgttcaggtccagggcaagagcaagagagaaaagaaagatagagtcttcacggacaagacctcagccacggtcatctgccgcaaaaatgccagcattagcgtgcgggcccaggaccgctactatagctcatcttggagcgaatgggcatctgtgccctgcagtggagggggcggcagcgggggaggcggcagcggcggcgggggatcgagaaacctccccgtggccactccagacccaggaatgttcccatgccttcaccactcccaaaacctgctgagggccgtcagcaacatgctccagaaggccagacaaactctagaattttacccttgcacttctgaagagattgatcatgaagatatcacaaaagataaaaccagcacagtggaggcctgtttaccattggaattaaccaagaatgagagttgcctaaattccagagagacctctttcataactaatgggagttgcctggcctccagaaagacctcttttatgatggccctgtgccttagtagtatttatgaagacttgaagatgtaccaggtggagttcaagaccatgaatgcaaagcttctgatggatcctaagaggcagatctttctagatcaaaacatgctggcagttattgatgagctgatgcaggccctgaatttcaacagtgagactgtgccacaaaaatcctcccttgaagaaccggatttttataaaactaaaatcaagctctgcatacttcttcatgctttcagaattcgggcagtgactattgatagagtgatgagctatctgaatgcttcctaagctagcttgactgactgagatacagcgtaccttcagctcacagacatgataagatacattgatgagtttggacaaaccacaactagaatgcagtgaaaaaaatgctttatttgtgaaatttgtgatgctattgctttatttgtaaccattataagctgcaataaacaagttaacaacaacaattgcattcattttatgtttcaggttcagggggaggtgtgggaggttttttaaagcaagtaaaacctctacaaatgtggtagtcgtcagctatcctgcaggaacttgtttatttgaaaatcaattcacaaaatccgagtagttattttgcctcccccttcccatttaacagaatacaccaatctctccccacgcacagctttaaacatttggataccattagatatagacatggttttagattccacattccaaacagtttcagagcgagccaatctggggtcagtgatagataaaaatccatcgggatagtcttttaaagcgctttcacagtccaactgctgcggatgcgactccggagtctggatcacggtcatctggaagaagaacgatgggaatcataatccgaaaacggtatcggacgattgtgtctcatcaaacccacaagcagccgctgtctgcgtcgctccgtgcgactgctgtttatgggatcagggtccacagtgtcctgaagcatgattttaatagcccttaacatcaactttctggtgcgatgcgcgcagcaacgcattctgatttcactcaaatctttgcagtaggtacaacacattattacaatattgtttaataaaccataattaaaagcgctccagccaaaactcatatctgatataatcgcccctgcatgaccatcataccaaagtttaatataaattaaatgacgttccctcaaaaacacactacccacatacatgatctcttttggcatgtgcatattaacaatctgtctgtaccatggacaacgttggttaatcatgcaacccaatataaccttccggaaccacactgccaacaccgctcccccagccatgcattgaagtgaaccctgctgattacaatgacaatgaagaacccaattctctcgaccgtgaatcacttgagaatgaaaaatatctatagtggcacaacatagacataaatgcatgcatcttctcataatttttaactcctcaggatttagaaacatatcccagggaataggaagctcttgcagaacagtaaagctggcagaacaaggaagaccacgaacacaacttacactatgcatagtcatagtatcacaatctggcaacagcgggtggtcttcagtcatagaagctcgggtttcattttcctcacaacgtggtaactgggctctggtgtaagggtgatgtctggcgcatgatgtcgagcgtgcgcgcaaccttgtcataatggagttgcttcctgacattctcgtattttgtatagcaaaacgcggccctggcagaacacactcttcttcgccttctatcctgccgcttagcgtgttccgtgtgatagttcaagtacaaccacactcttaagttggtcaaaagaatgctggcttcagttgtaatcaaaactccatcgcatctaatcgttctgaggaaatcatccaagcaatgcaactggattgtgtttcaagcaggagaggagagggaagagacggaagaaccatgttaatttttattccaaacgatctcgcagtacttcaaattgtagatcgcgcagatggcatctctcgcccccactgtgttggtgaaaaagcacagctagatcaaaagaaatgcgattttcaaggtgctcaacggtggcttccagcaaagcctccacgcgcacatccaagaacaaaagaataccaaaagaaggagcattttctaactcctcaatcatcatattacattcctgcaccattcccagataattttcagctttccagccttgaattattcgtgtcagttcttgtggtaaatccaatccacacattacaaacaggtcccggagggcgccctccaccaccattcttaaacacaccctcataatgacaaaatatcttgctcctgtgtcacctgtagcgaattgagaatggcaacatcaattgacatgcccttggctctaagttcttctttaagttctagttgtaaaaactctctcatattatcaccaaactgcttagccagaagccccccgggaacaagagcaggggacgctacagtgcagtacaagcgcagacctccccaattggctccagcaaaaacaagattggaataagcatattgggaaccgccagtaatatcatcgaagttgctggaaatataatcaggcagagtttcttgtaaaaattgaataaaagaaaaatttgccaaaaaaacattcaaaacctctgggatgcaaatgcaataggttaccgcgctgcgctccaacattgttagttttgaattagtctgcaaaaataaaaaaaaaaacaagcgtcatatcatagtagcctgacgaacagatggataaatcagtctttccatcacaagacaagccacagggtctccagctcgaccctcgtaaaacctgtcatcatgattaaacaacagcaccgaaagttcctcgcggtgaccagcatgaataattcttgatgaagcatacaatccagacatgttagcatcagttaacgagaaaaaacagccaacatagcctttgggtataattatgcttaatcgtaagtatagcaaagccacccctcgcggatacaaagtaaaaggcacaggagaataaaaaatataattatttctctgctgctgttcaggcaacgtcgcccccggtccctctaaatacacatacaaagcctcatcagccatggcttaccagacaaagtacagcgggcacacaaagcacaagctctaaagtgactctccaacctctccacaatatatatatacacaagccctaaactgacgtaatgggagtaaagtgtaaaaaatcccgccaaacccaacacacaccccgaaactgcgtcaccagggaaaagtacagtttcacttccgcaatcccaacaggcgtaacttcctctttctcacggtacgtgatatcccactaacttgcaacgtcattttcccacggtcgcaccgccccttttagccgttaaccccacagccaatcaccacacgatccacactttttaaaatcacctcatttacatattggcaccattccatctataaggtatattatatagatagaggcgcgccctctcttaaggtagcatcgggatcgagtccctgagagaacatcctcaatcccgatctatccttagatccgaggaatatcgaaatcagttacgctagggataacagggtaatatagcatcccctcggattgctatctaccggctcgtcagctatgatctctcgatttcgatcaagaaatctcattggttaccttgggctatcgaaaccagtcaagtcagctacttggcgagatcgacttgtctgagtttcgactacgctcagaattgcgtcagcgcctatcgccaggtattactccaatcccgaatatccgagcctgagagaacatcctcaatcccgatctatccttagatccgaggaatatcgaaatcgtttaaatcttttcttgatggtaaatcattcgaatataagaatggagagacgaatggggaaacgacaaagatgacattctttggtccttctggtgaggttctcaagtttttggttaatcctgtcaacaacttatatcgtatggggctgacttcaggtgctacatttgaagagataaattgcactgaaatctagtaatattttatctgattaataagatgatcttcttgagatcgttttggtctgcgcgtaatctcttgctctgaaaacgaaaaaaccgccttgcagggcggtttttcgaaggttctctgagctaccaactctttgaaccgaggtaactggcttggcagagcgcagtcaccaaaacttgtcctttcagtttagccttaaccggcgcatgacttcaagactaactctgctaaatcaattaccagtggctgctgccagtggtgcttttgcatgtctttccgggttggactcaagacgatagttaccggataaggcgcagcggtcggactgaacggggggttcgtgcatacagtccagcttggagcgaactgcctacccggaactgagtgtcaggcgtggaatgagacaaacgcggccataacagcggaatgacaccggtaaaccgaaaggcaggaacaggagagcgcacgagggagccgccagggggaaacgcctggtatctttatagtcctgtcgggtttcgccaccactgatttgagcgtcagatttcgtgatgcttgtcaggggggcggagcctatggaaaaacggctttgccgcggccctctcacttccctgttaagtatcttcctggcatcttccaggaaatctccgccccgttcgtaagccatttccgctcgccgcagtcgaacgaccgagcgtagcgagtcagtgagcgaggaagcggaatatatcctgtatcacatattctgctgacgcaccggtgcggccttttttctcctgccacatgaagcacttcactgacaccctcatcagtgccaacatagtaagccagtatacactccgctaatttaaacgtggtgtaccgagaacgatcctctcagtgcgatctcgacgatcagtggtattccgacatatcgttgcttggcagtcagccagtcgatcctagcttgggacccaggaagtccaatcgtcagatattgtactcagcctggtcacggcagcgtaccgatctcgtaactataacggtcctaaggtagcgaactagatattgatagtctgatcggtcaacgtataatcgagtcctagcttttgcaaacatctatcaagagacaggatcagcaggaggctttcgcatgattgaacaagatggattgcacgcaggttctccggcggcttgggtggagaggctattcggctatgactgggcacaacagacaatcggctgctctgatgccgccgtgttccggctgtcagcgcaggggcgtccggttctttttgtcaagaccgacctgtccggtgccctgaatgaactgcaagacgaggcagcgcggctatcgtggctggcgacgacgggcgttccttgcgcggctgtgctcgacgttgtcactgaagcgggaagggactggctgctattgggcgaagtgccggggcaggatctcctgtcatctcaccttgctcctgccgagaaagtatccatcatggctgatgcaatgcggcggctgcatacgcttgatccggctacctgcccattcgaccaccaagcgaaacatcgcatcgagcgagcacgtactcggatggaagccggtcttgtcgatcaggatgatctggacgaagagcatcaggggctcgcgccagccgaactgttcgccaggctcaaggcgtctatgcccgacggcgaggatctcgtcgtgacccacggcgatgcctgcttgccgaatatcatggtggaaaatggccgcttttctggattcatcgactgtggccgtctgggtgtggcggaccgctatcaggacatagcgttggctacccgtgatattgctgaagagcttggcggcgaatgggctgaccgcttccttgtgctttacggtatcgccgcgcccgattcgcagcgcatcgccttctatcgccttcttgacgagttcttctgaccgattctaggtgcattggcgcagaaaaaaatgcctgatgcgacgctgcgcgtcttatactcccacatatgccagattcagcaacggatacggcttccccaacttgcccacttccatacgtgtcctccttaccagaaatttatccttaaggtccgtaactataacggtcctaaggtagcgaatcgacctagctctatcgaatctccctcgtttcgagcttacgcgaactagcctctggcgatagcatccgaggggcaggcatctatgtcgggtgcggagaaagaggtaatgtcaagttcgatctgattgcttggcataaagtccgatggttcgagtagactcagttcaacctctctcttaaggtagc

SEQ ID NO: 102 - DNA, 35785 bp, Artificial Sequence
  Genome sequence of NG-759 virus
tctatctatataatataccttatagatggaatggtgccaatatgtaaatgaggtgattttaaaaagtgtggatcgtgtggtgattggctgtggggttaacggctaaaaggggcggtgcgaccgtgggaaaatgacgttttgtgggggtggagtttttttgcaagttgtcgcgggaaatgtgacgcataaaaaggcttttttctcacggaactacttagttttcccacggtatttaacaggaaatgaggtagttttgaccggatgcaagtgaaaattgttgattttcgcgcgaaaactgaatgaggaagtgtttttctgaataatgtggtatttatggcagggtggagtatttgttcagggccaggtagactttgacccattacgtggaggtttcgattaccgtgttttttacctgaatttccgcgtaccgtgtcaaagtcttctgtttttacgtaggtgtcagctgatcgctagggtatttatacctcagggtttgtgtcaagaggccactcttgagtgccagcgagaagagttttctcctctgcgccggcagtttaataataaaaaaatgagagatttgcgatttctgcctcaggaaataatctctgctgagactggaaatgaaatattggagcttgtggtgcacgccctgatgggagacgatccggagccacctgtgcagctttttgagcctcctacgcttcaggaactgtatgatttagaggtagagggatcggaggattctaatgaggaagctgtaaatggcttttttaccgattctatgcttttagctgctaatgaagggttagaattagatccgcctttggacacttttgatactccaggggtaattgtggaaagcggtacaggtgtaagaaaattacctgatttgagttccgtggactgtgatttgcactgctatgaagacgggtttcctccgagtgatgaggaggaccatgaaaaggagcagtccatgcagactgcagcgggtgagggagtgaaggctgccaatgttggttttcagttggattgcccggagcttcctggacatggctgtaagtcttgtgaatttcacaggaaaaatactggagtaaaggaactgttatgttcgctttgttatatgagaacgcactgccactttatttacagtaagtgtgtttaagttaaaatttaaaggaatatgctgtttttcacatgtatattgagtgtgagttttgtgcttcttattataggtcctgtgtctgatgctgatgaatcaccatctcctgattctactacctcacctcctgagattcaagcacctgttcctgtggacgtgcgcaagcccattcctgtgaagcttaagcctgggaaacgtccagcagtggaaaaacttgaggacttgttacagggtggggacggacctttggacttgagtacacggaaacgtccaagacaataagtgttccatatccgtgtttacttaaggtgacgtcaatatttgtgtgacagtgcaatgtaataaaaatatgttaactgttcactggtttttattgctttttgggcggggactcaggtatataagtagaagcagacctgtgtggttagctcataggagctggctttcatccatggaggtttgggccattttggaagaccttaggaagactaggcaactgttagagaacgcttcggacggagtctccggtttttggagattctggttcgctagtgaattagctagggtagtttttaggataaaacaggactataaacaagaatttgaaaagttgttggtagattgcccaggactttttgaagctcttaatttgggccatcaggttcactttaaagaaaaagttttatcagttttagacttttcaaccccaggtagaactgctgctgctgtggcttttcttacttttatattagataaatggatcccgcagactcatttcagcaggggatacgttttggatttcatagccacagcattgtggagaacatggaaggttcgcaagatgaggacaatcttaggttactggccagtgcagcctttgggtgtagcgggaatcctgaggcatccaccggtcatgccagcggttctggaggaggaacagcaagaggacaacccgagagccggcctggaccctccagtggaggaggcggagtagctgacttgtctcctgaactgcaacgggtgcttactggatctacgtccactggacgggataggggcgttaagagggagagggcatctagtggtactgatgctagatctgagttggctttaagtttaatgagtcgcagacgtcctgaaaccatttggtggcatgaggttcagaaagagggaagggatgaagtttctgtattgcaggagaaatattcactggaacaggtgaaaacatgttggttggagcctgaggatgattgggaggtggccattaaaaattatgccaagatagctttgaggcctgataaacagtataagattactagacggattaatatccggaatgcttgttacatatctggaaatggggctgaggtggtaatagatactcaagacaaggcagttattagatgctgcatgatggatatgtggcctggggtagtcggtatggaagcagtaacttttgtaaatgttaagtttaggggagatggttataatggaatagtgtttatggccaataccaaacttatattgcatggttgtagcttttttggtttcaacaatacctgtgtagatgcctggggacaggttagtgtacggggatgtagtttctatgcgtgttggattgccacagctggcagaaccaagagtcaattgtctctgaagaaatgcatatttcaaagatgtaacctgggcattctgaatgaaggcgaagcaagggtccgccactgcgcttctacagatactggatgttttattttgattaagggaaatgccagcgtaaagcataacatgatttgcggtgcttccgatgagaggccttatcaaatgctcacttgtgctggtgggcattgtaatatgctggctactgtgcatattgtttcccatcaacgcaaaaaatggcctgtttttgatcacaatgtgatgacgaagtgtaccatgcatgcaggtgggcgtagaggaatgtttatgccttaccagtgtaacatgaatcatgtgaaagtgttgttggaaccagatgccttttccagaatgagcctaacaggaatttttgacatgaacatgcaaatctggaagatcctgaggtatgatgatacgagatcgagggtacgcgcatgcgaatgcggaggcaagcatgccaggttccagccggtgtgtgtagatgtgactgaagatctcagaccggatcatttggttattgcccgcactggagcagagttcggatccagtggagaagaaactgactaaggtgagtattgggaaaactttggggtgggattttcagatggacagattgagtaaaaatttgttttttctgtcttgcagctgtcatgagtggaaacgcttcttttaaggggggagtcttcagcccttatctgacagggcgtctcccatcctgggcaggagttcgtcagaatgttatgggatctactgtggatggaagacccgtccaacccgccaattcttcaacgctgacctatgctactttaagttcttcacctttggacgcagctgcagctgccgccgccgcttctgttgccgctaacactgtgcttggaatgggttactatggaagcatcatggctaattccacttcctctaataacccttctaccctgactcaggacaagttacttgtccttttggcccagctggaggctttgacccaacgtctgggtgaactttctcagcaggtggtcgagttgcgagtacaaactgagtctgctgtcggcacggcaaagtctaaataaaaaaatcccagaatcaatgaataaataaacaagcttgttgttgatttaaaatcaagtgtttttatttcatttttcgcgcacggtatgccctagaccaccgatctctatcattgagaactcggtggattttttccaggatcctatagaggtgggattgaatgtttagatacatgggcattaggccgtctttggggtggagatagctccattgaagggattcatgctccggggtagtgttgtaaatcacccagtcataacaaggtcgcagtgcatggtgttgcacaatatcttttagaagtaggctgattgccacagataagcccttggtgtaggtgtttacaaaccggttgagctgggatgggtgcattcggggtgaaattatgtgcattttggattggatttttaagttggcaatattgccgccaagatcccgtcttgggttcatgttatgaaggaccaccaagacggtgtatccggtacatttaggaaatttatcgtgcagcttggatggaaaagcgtggaaaaatttggagacacccttgtgtcctccaagattttccatgcactcatccatgataatagcaatggggccgtgggcagcggcgcgggcaaacacgttccgtgggtctgacacatcatagttatgttcctgagttaaatcatcataagccattttaatgaatttggggcggagagtaccagattggggtatgaatgttccttcgggccccggagcatagttcccctcacagatttgcatttcccaagctttcagttccgagggtggaatcatgtccacctggggggctatgaaaaacaccgtttctggggcgggggtgattaattgtgatgatagcaaatttctgagcaattgagatttgccacatccggtggggccataaatgattccgattacgggttgcaggtggtagtttagggaacggcaactgccgtcttctcgaagcaagggggccacctcgttcatcatttcccttacatgcatattttcccgcaccaaatccattaggaggcgctctcctcctagtgatagaagttcttgtagtgaggaaaagtttttcagcggtttcagaccgtcagccatgggcattttggagagagtttgctgcaaaagttctagtctgttccacagttcagtgatgtgttctatggcatctcgatccagcagacctcctcgtttcgcgggtttggacggctcctggaatagggtatgagacgatgggcgtccagcgctgccagggttcggtccttccagggtctcagtgttcgagtcagggttgtttccgtcacagtgaaggggtgtgcgcctgcttgggcgcttgccagggtgcgcttcagactcatcctgctggtcgaaaacttctgtcgcttggcgccctgtatgtcggccaagtagcagtttaccatgagttcgtagttgagcgcctcggctgcgtggcctttggcgcggagcttacctttggaagttttcttgcataccgggcagtataggcatttcagcgcatacaacttgggcgcaaggaaaacggattctggggagtatgcatctgcgccgcaggaggcgcaaacagtttcacattccaccagccaggttaaatccggttcattggggtcaaaaacaagttttccgccatattttttgatgcgtttcttacctttggtctccatgagttcgtgtcctcgttgagtgacaaacaggctgtccgtgtccccgtagactgattttacaggcctcttctccagtggagtgcctcggtcttcttcgtacaggaactctgaccactctgatacaaaggcgcgcgtccaggccagcacaaaggaggctatgtgggaggggtagcgatcgttgtcaaccagggggtccaccttttccaaagtatgcaaacacatgtcaccctcttcaacatccaggaatgtgattggcttgtaggtgtatttcacgtgacctggggtccccgctgggggggtataaaagggggcggttctttgctcttcctcactgtcttccggatcgctgtccaggaacgtcagctgttggggtaggtattccctctcgaaggcgggcatgacctctgcactcaggttgtcagtttctaagaacgaggaggatttgatattgacagtgccggttgagatgcctttcatgaggttttcgtccatctggtcagaaaacacaatttttttattgtcaagtttggtggcaaatgatccatacagggcgttggataaaagtttggcaatggatcgcatggtttggttcttttccttgtccgcgcgctctttggcggcgatgttgagttggacatactcgcgtgccaggcacttccattcggggaagatagttgttaattcatctggcacgattctcacttgccaccctcgattatgcaaggtaattaaatccacactggtggccacctcgcctcgaaggggttcattggtccaacagagcctacctcctttcctagaacagaaagggggaagtgggtctagcataagttcatcgggagggtctgcatccatggtaaagattcccggaagtaaatccttatcaaaatagctgatgggagtggggtcatctaaggccatttgccattctcgagctgccagtgcgcgctcatatgggttaaggggactgccccatggcatgggatgggtgagtgcagaggcatacatgccacagatgtcatagacgtagatgggatcctcaaagatgcctatgtaggttggatagcatcgcccccctctgatacttgctcgcacatagtcatatagttcatgtgatggcgctagcagccccggacccaagttggtgcgattgggtttttctgttctgtagacgatctggcgaaagatggcgtgagaattggaagagatggtgggtctttgaaaaatgttgaaatgggcatgaggtagacctacagagtctctgacaaagtgggcataagattcttgaagcttggttaccagttcggcggtgacaagtacgtctagggcgcagtagtcaagtgtttcttgaatgatgtcataacctggttggtttttcttttcccacagttcgcggttgagaaggtattcttcgcgatccttccagtactcttctagcggaaacccgtctttgtctgcacggtaagatcctagcatgtagaactgattaactgccttgtaagggcagcagcccttctctacgggtagagagtatgcttgagcagcttttcgtagcgaagcgtgagtaagggcaaaggtgtctctgaccatgactttgaggaattggtatttgaagtcgatgtcgtcacaggctccctgttcccagagttggaagtctacccgtttcttgtaggcggggttgggcaaagcgaaagtaacatcattgaagagaatcttgccggccctgggcatgaaattgcgagtgatgcgaaaaggctgtggtacttccgctcggttattgataacctgggcagctaggacgatctcgtcgaaaccgttgatgttgtgtcctacgatgtataattctatgaaacgcggcgtgcctctgacgtgaggtagcttactgagctcatcaaaggttaggtctgtggggtcagataaggcgtagtgttcgagagcccattcgtgcaggtgaggattcgctttaaggaaggaggaccagaggtccactgccagtgctgtttgtaactggtcccggtactgacgaaaatgccgtccgactgccattttttctggggtgacgcaatagaaggtttgggggtcctgccgccagcgatcccacttgagttttatggcgaggtcataggcgatgttgacgagccgctggtctccagagagtttcatgaccagcatgaaggggattagctgcttgccaaaggaccccatccaggtgtaggtttccacatcgtaggtgagaaagagcctttctgtgcgaggatgagagccaatcgggaagaactggatctcctgccaccagttggaggaatggctgttgatgtgatggaagtagaactccctgcgacgcgccgagcattcatgcttgtgcttgtacagacggccgcagtagtcgcagcgttgcacgggttgtatctcgtgaatgagttgtacctggcttcccttgacgagaaatttcagtgggaagccgaggcctggcgattgtatctcgtgctttactatgttgtctgcatcggcctgttcatcttctgtctcgatggtggtcatgctgacgagccctcgcgggaggcaagtccagacctcggcgcggcaggggcggagctcgaggacgagagcgcgcaggctggagctgtccagggtcctgagacgctgcggactcaggttagtaggcagtgtcaggagattaacttgcatgatcttttggagggcgtgcgggaggttcagatagtacttgatctcaacgggtccgttggtggagatgtcgatggcttgcagggttccgtgtcccttgggcgctaccaccgtgcccttgtttttcattttggacggcggtggctctgttgcttcttgcatgtttagaagcggtgtcgagggcgcgcaccgggcggcaggggcggctcgggacccggcggcatggctggcagtggtacgtcggcgccgcgcgcgggtaggttctggtactgcgccctgagaagactcgcatgcgcgacgacgcggcggttgacatcctggatctgacgcctctgggtgaaagctaccggccccgtgagcttgaacctgaaagagagttcaacagaatcaatctcggtatcgttgacggcggcttgcctaaggatttcttgcacgtcaccagagttgtcctggtaggcgatctccgccatgaactgctcgatctcttcctcttgaagatctccgcggcccgctctctcgacggtggccgcgaggtcgttggagatgcgcccaatgagttgagagaatgcattcatgcccgcctcgttccagacgcggctgtagaccacggcccccacgggatctctcgcgcgcatgaccacctgggcgaggttgagctccacgtggcgggtgaagaccgcatagttgcataggcgctggaaaaggtagttgagtgtggtggcgatgtgctcggtgacgaagaaatacatgatccatcgtctcagcggcatctcgctgacatcgcccagagcttccaagcgctccatggcctcgtagaagtccacggcaaaattaaaaaactgggagtttcgcgcggacacggtcaactcctcttccagaagacggataagttcggcgatggtggtgcgcacctcgcgctcgaaagcccctgggatttcttcctcaatctcttcttcttccactaacatctcttcctcttcaggtggggctgcaggaggagggggaacgcggcgacgccggcggcgcacgggcagacggtcgatgaatctttcaatgacctctccgcggcggcggcgcatggtttcagtgacggcgcggccgttctcgcgcggtcgcagagtaaaaacaccgccgcgcatctccttaaagtggtgactgggaggttctccgtttgggagggagagggcgctgattatacattttattaattggcccgtagggactgcacgcagagatctgatcgtgtcaagatccacgggatctgaaaacctttcgacgaaagcgtctaaccagtcacagtcacaaggtaggctgagtacggcttcttgtgggcgggggtggttatgtgttcggtctgggtcttctgtttcttcttcatctcgggaaggtgagacgatgctgctggtgatgaaattaaagtaggcagttctaagacggcggatggtggcgaggagcaccaggtctttgggtccggcttgctggatacgcaggcgattggccattccccaagcattatcctgacatctagcaagatctttgtagtagtcttgcatgagccgttctacgggcacttcttcctcacccgttctgccatgcatacgtgtgagtccaaatccgcgcattggttgtaccagtgccaagtcagctacgactctttcggcgaggatggcttgctgtacttgggtaagggtggcttgaaagtcatcaaaatccacaaagcggtggtaagctcctgtattaatggtgtaagcacagttggccatgactgaccagttaactgtctggtgaccagggcgcacgagctcggtgtatttaaggcgcgaataggcgcgggtgtcaaagatgtaatcgttgcaggtgcgcaccagatactggtaccctataagaaaatgcggcggtggttggcggtagagaggccatcgttctgtagctggagcgccaggggcgaggtcttccaacataaggcggtgatagccgtagatgtacctggacatccaggtgattcctgcggcggtagtagaagcccgaggaaactcgcgtacgcggttccaaatgttgcgtagcggcatgaagtagttcattgtaggcacggtttgaccagtgaggcgcgcgcagtcattgatgctctatagacacggagaaaatgaaagcgttcagcgactcgactccgtagcctggaggaacgtgaacgggttgggtcgcggtgtaccccggttcgagacttgtactcgagccggccggagccgcggctaacgtggtattggcactcccgtctcgacccagcctacaaaaatccaggatacggaatcgagtcgttttgctggtttccgaatggcagggaagtgagtcctattttttttttttgccgctcagatgcatcccgtgctgcgacagatgcgcccccaacaacagcccccctcgcagcagcagcagcagcaatcacaaaaggctgtccctgcaactactgcaactgccgccgtgagcggtgcgggacagcccgcctatgatctggacttggaagagggcgaaggactggcacgtctaggtgcgccttcacccgagcggcatccgcgagttcaactgaaaaaagattctcgcgaggcgtatgtgccccaacagaacctatttagagacagaagcggcgaggagccggaggagatgcgagcttcccgctttaacgcgggtcgtgagctgcgtcacggtttggaccgaagacgagtgttgcgggacgaggatttcgaagttgatgaaatgacagggatcagtcctgccagggcacacgtggctgcagccaaccttgtatcggcttacgagcagacagtaaaggaagagcgtaacttccaaaagtcttttaataatcatgtgcgaaccctgattgcccgcgaagaagttacccttggtttgatgcatttgtgggatttgatggaagctatcattcagaaccctactagcaaacctctgaccgcccagctgtttctggtggtgcaacacagcagagacaatgaggctttcagagaggcgctgctgaacatcaccgaacccgaggggagatggttgtatgatcttatcaacattctacagagtatcatagtgcaggagcggagcctgggcctggccgagaaggtggctgccatcaattactcggttttgagcttgggaaaatattacgctcgcaaaatctacaagactccatacgttcccatagacaaggaggtgaagatagatgggttctacatgcgcatgacgctcaaggtcttgaccctgagcgatgatcttggggtgtatcgcaatgacagaatgcatcgcgcggttagcgccagcaggaggcgcgagttaagcgacagggaactgatgcacagtttgcaaagagctctgactggagctggaaccgagggtgagaattacttcgacatgggagctgacttgcagtggcagcctagtcgcagggctctgagcgccgcgacggcaggatgtgagcttccttacatagaagaggcggatgaaggcgaggaggaagagggcgagtacttggaagactgatggcacaacccgtgttttttgctagatggaacagcaagcaccggatcccgcaatgcgggcggcgctgcagagccagccgtccggcattaactcctcggacgattggacccaggccatgcaacgtatcatggcgttgacgactcgcaaccccgaagcctttagacagcaaccccaggccaaccgtctatcggccatcatggaagctgtagtgccttcccgctctaatcccactcatgagaaggtcctggccatcgtgaacgcgttggtggagaacaaagctattcgtccagatgaggccggactggtatacaacgctctcttagaacgcgtggctcgctacaacagtagcaatgtgcaaaccaatttggaccgtatgataacagatgtacgcgaagccgtgtctcagcgcgaaaggttccagcgtgatgccaacctgggttcgctggtggcgttaaatgctttcttgagtactcagcctgctaatgtgccgcgtggtcaacaggattatactaactttttaagtgctttgagactgatggtatcagaagtacctcagagcgaagtgtatcagtccggtcctgattacttctttcagactagcagacagggcttgcagacggtaaatctgagccaagcttttaaaaaccttaaaggtttgtggggagtgcatgccccggtaggagaaagagcaaccgtgtctagcttgttaactccgaactcccgcctattattactgttggtagctcctttcaccgacagcggtagcatcgaccgtaattcctatttgggttacctactaaacctgtatcgcgaagccatagggcaaagtcaggtggacgagcagacctatcaagaaattacccaagtcagtcgcgctttgggacaggaagacactggcagtttggaagccactctgaacttcttgcttaccaatcggtctcaaaagatccctcctcaatatgctcttactgcggaggaggagaggatccttagatatgtgcagcagagcgtgggattgtttctgatgcaagagggggcaactccgactgcagcactggacatgacagcgcgaaatatggagcccagcatgtatgccagtaaccgacctttcattaacaaactgctggactacttgcacagagctgccgctatgaactctgattatttcaccaatgccatcttaaacccgcactggctgcccccacctggtttctacacgggcgaatatgacatgcccgaccctaatgacggatttctgtgggacgacgtggacagcgatgttttttcacctctttctgatcatcgcacgtggaaaaaggaaggcggcgatagaatgcattcttctgcatcgctgtccggggtcatgggtgctaccgcggctgagcccgagtctgcaagtccttttcctagtctacccttttctctacacagtgtacgtagcagcgaagtgggtagaataagtcgcccgagtttaatgggcgaagaggagtatctaaacgattccttgctcagaccggcaagagaaaaaaatttcccaaacaatggaatagaaagtttggtggataaaatgagtagatggaagacttatgctcaggatcacagagacgagcctgggatcatggggattacaagtagagcgagccgtagacgccagcgccatgacagacagaggggtcttgtgtgggacgatgaggattcggccgatgatagcagcgtgctggacttgggtgggagaggaaggggcaacccgtttgctcatttgcgccctcgcttgggtggtatgttgtaaaaaaaaataaaaaaaaaactcaccaaggccatggcgacgagcgtacgttcgttcttctttattatctgtgtctagtataatgaggcgagtcgtgctaggcggagcggtggtgtatccggagggtcctcctccttcgtacgagagcgtgatgcagcagcagcaggcgacggcggtgatgcaatccccactggaggctccctttgtgcctccgcgatacctggcacctacggagggcagaaacagcattcgttattcggaactggcacctcagtacgataccaccaggttgtatctggtggacaacaagtcggcggacattgcttctctgaactatcagaatgaccacagcaacttcttgaccacggtggtgcaaaacaatgactttacccctacggaagccagcacccagaccattaactttgatgaacgatcgcggtggggcggtcagctaaagaccatcatgcatactaacatgccaaacgtgaacgagtatatgtttagtaacaagttcaaagcgcgtgtgatggtgtccagaaaacctcccgacggtgctgcagttggggatacttatgatcacaagcaggatattttgaaatatgagtggttcgagtttactttgccagaaggcaacttttcagttactatgactattgatttgatgaacaatgccatcatagataattacttgaaagtgggtagacagaatggagtgcttgaaagtgacattggtgttaagttcgacaccaggaacttcaagctgggatgggatcccgaaaccaagttgatcatgcctggagtgtatacgtatgaagccttccatcctgacattgtcttactgcctggctgcggagtggattttaccgagagtcgtttgagcaaccttcttggtatcagaaaaaaacagccatttcaagagggttttaagattttgtatgaagatttagaaggtggtaatattccggccctcttggatgtagatgcctatgagaacagtaagaaagaacaaaaagccaaaatagaagctgctacagctgctgcagaagctaaggcaaacatagttgccagcgactctacaagggttgctaacgctggagaggtcagaggagacaattttgcgccaacacctgttccgactgcagaatcattattggccgatgtgtctgaaggaacggacgtgaaactcactattcaacctgtagaaaaagatagtaagaatagaagctataatgtgttggaagacaaaatcaacacagcctatcgcagttggtatctttcgtacaattatggcgatcccgaaaaaggagtgcgttcctggacattgctcaccacctcagatgtcacctgcggagcagagcaggtctactggtcgcttccagacatgatgaaggatcctgtcactttccgctccactagacaagtcagtaactaccctgtggtgggtgcagagcttatgcccgtcttctcaaagagcttctacaacgaacaagctgtgtactcccagcagctccgccagtccacctcgcttacgcacgtcttcaaccgctttcctgagaaccagattttaatccgtccgccggcgcccaccattaccaccgtcagtgaaaacgttcctgctctcacagatcacgggaccctgccgttgcgcagcagtatccggggagtccaacgtgtgaccgttactgacgccagacgccgcacctgtccctacgtgtacaaggcactgggcatagtcgcaccgcgcgtcctttcaagccgcactttctaaaaaaaaaaaaaatgtccattcttatctcgcccagtaataacaccggttggggtctgcgcgctccaagcaagatgtacggaggcgcacgcaaacgttctacccaacatcctgtccgtgttcgcggacattttcgcgctccatggggcgccctcaagggccgcactcgcgttcgaaccaccgtcgatgatgtaatcgatcaggtggttgccgacgcccgtaattatactcctactgcgcctacatctactgtggatgcagttattgacagtgtagtggctgacgctcgcaactatgctcgacgtaagagccggcgaaggcgcattgccagacgccaccgagctaccactgccatgcgagccgcaagagctctgctacgaagagctagacgcgtggggcgaagagccatgcttagggcggccagacgtgcagcttcgggcgccagcgccggcaggtcccgcaggcaagcagccgctgtcgcagcggcgactattgccgacatggcccaatcgcgaagaggcaatgtatactgggtgcgtgacgctgccaccggtcaacgtgtacccgtgcgcacccgtccccctcgcacttagaagatactgagcagtctccgatgttgtgtcccagcggcgaggatgtccaagcgcaaatacaaggaagaaatgctgcaggttatcgcacctgaagtctacggccaaccgttgaaggatgaaaaaaaaccccgcaaaatcaagcgggttaaaaaggacaaaaaagaagaggaagatggcgatgatgggctggcggagtttgtgcgcgagtttgccccacggcgacgcgtgcaatggcgtgggcgcaaagttcgacatgtgttgagacctggaacttcggtggtctttacacccggcgagcgttcaagcgctacttttaagcgttcctatgatgaggtgtacggggatgatgatattcttgagcaggcggctgaccgattaggcgagtttgcttatggcaagcgtagtagaataacttccaaggatgagacagtgtcgatacccttggatcatggaaatcccacccctagtcttaaaccggtcactttgcagcaagtgttacccgtaactccgcgaacaggtgttaaacgcgaaggtgaagatttgtatcccactatgcaactgatggtacccaaacgccagaagttggaggacgttttggagaaagtaaaagtggatccagatattcaacctgaggttaaagtgagacccattaagcaggtagcgcctggtctgggggtacaaactgtagacattaagattcccactgaaagtatggaagtgcaaactgaacccgcaaagcctactgccacctccactgaagtgcaaacggatccatggatgcccatgcctattacaactgacgccgccggtcccactcgaagatcccgacgaaagtacggtccagcaagtctgttgatgcccaattatgttgtacacccatctattattcctactcctggttaccgaggcactcgctactatcgcagccgaaacagtacctcccgccgtcgccgcaagacacctgcaaatcgcagtcgtcgccgtagacgcacaagcaaaccgactcccggcgccctggtgcggcaagtgtaccgcaatggtagtgcggaacctttgacactgccgcgtgcgcgttaccatccgagtatcatcacttaatcaatgttgccgctgcctccttgcagatatggccctcacttgtcgccttcgcgttcccatcactggttaccgaggaagaaactcgcgccgtagaagagggatgttgggacgcggaatgcgacgctacaggcgacggcgtgctatccgcaagcaattgcggggtggttttttaccagccttaattccaattatcgctgctgcaattggcgcgataccaggcatagcttccgtggcggttcaggcctcgcaacgacattgacattggaaaaaaacgtataaataaaaaaaaaaaaatacaatggactctgacactcctggtcctgtgactatgttttcttagagatggaagacatcaatttttcatccttggctccgcgacacggcacgaagccgtacatgggcacctggagcgacatcggcacgagccaactgaacgggggcgccttcaattggagcagtatctggagcgggcttaaaaattttggctcaaccataaaaacatacgggaacaaagcttggaacagcagtacaggacaggcgcttagaaataaacttaaagaccagaacttccaacaaaaagtagtcgatgggatagcttccggcatcaatggagtggtagatttggctaaccaggctgtgcagaaaaagataaacagtcgtttggacccgccgccagcaaccccaggtgaaatgcaagtggaggaagaaattcctccgccagaaaaacgaggcgacaagcgtccgcgtcccgatttggaagagacgctggtgacgcgcgtagatgaaccgccttcttatgaggaagcaacgaagcttggaatgcccaccactagaccgatagccccaatggccaccggggtgatgaaaccttctcagttgcatcgacccgtcaccttggatttgccccctccccctgctgctactgctgtacccgcttctaagcctgtcgctgccccgaaaccagtcgccgtagccaggtcacgtcccgggggcgctcctcgtccaaatgcgcactggcaaaatactctgaacagcatcgtgggtctaggcgtgcaaagtgtaaaacgccgtcgctgcttttaattaaatatggagtagcgcttaacttgcctatctgtgtatatgtgtcattacacgccgtcacagcagcagaggaaaaaaggaagaggtcgtgcgtcgacgctgagttactttcaagatggccaccccatcgatgctgccccaatgggcatacatgcacatcgccggacaggatgcttcggagtacctgagtccgggtctggtgcagttcgcccgcgccacagacacctacttcaatctgggaaataagtttagaaatcccaccgtagcgccgacccacgatgtgaccaccgaccgtagccagcggctcatgttgcgcttcgtgcccgttgaccgggaggacaatacatactcttacaaagtgcggtacaccctggccgtgggcgacaacagagtgctggatatggccagcacgttctttgacattaggggtgtgttggacagaggtcccagtttcaaaccctattctggtacggcttacaactccctggctcctaaaggcgctccaaatacatctcagtggattgcagaaggtgtaaaaaatacaactggtgaggaacacgtaacagaagaggaaaccaatactactacttacacttttggcaatgctcctgtaaaagctgaagctgaaattacaaaagaaggactcccagtaggtttggaagtttcagatgaagaaagtaaaccgatttatgctgataaaacatatcagccagaacctcagctgggagatgaaacttggactgaccttgatggaaaaaccgaaaagtatggaggcagggctctcaaacccgatactaagatgaaaccatgctacgggtcctttgccaaacctactaatgtgaaaggcggtcaggcaaaacaaaaaacaacggagcagccaaatcagaaagtcgaatatgatatcgacatggagttttttgatgcggcatcgcagaaaacaaacttaagtcctaaaattgtcatgtatgcagaaaatgtaaatttggaaactccagacactcatgtagtgtacaaacctggaacagaagacacaagttccgaagctaatttgggacaacaatctatgcccaacagacccaactacattggcttcagagataactttattggacttatgtactataacagtactggtaacatgggggtgctggctggtcaagcgtctcagttaaatgcagtggttgacttgcaggacagaaacacagaactttcttaccaactcttgcttgactctctgggcgacagaaccagatactttagcatgtggaatcaggctgtggacagttatgatcctgatgtacgtgttattgaaaatcatggtgtggaagatgaacttcccaactactgttttccactggacggcataggtgttccaacaaccagttacaaatcaatagttccaaatggagacaatgcgcctaattggaaggaacctgaagtaaatggaacaagtgagatcggacagggtaatttgtttgccatggaaattaaccttcaagccaatctatggcgaagtttcctttattccaatgtggctctatatctcccagactcgtacaaatacaccccgtccaatgtcactcttccagaaaacaaaaacacctacgactacatgaacgggcgggtggtgccgccatctctagtagacacctatgtgaacattggtgccaggtggtctctggatgccatggacaatgtcaacccattcaaccaccaccgtaacgctggcttgcgttaccgatccatgcttctgggtaacggacgttatgtgcctttccacatacaagtgcctcaaaaattcttcgctgttaaaaacctgctgcttctcccaggctcctacacttatgagtggaactttaggaaggatgtgaacatggttctacagagttccctcggtaacgacctgcgggtagatggcgccagcatcagtttcacgagcatcaacctctatgctacttttttccccatggctcacaacaccgcttccacccttgaagccatgctgcggaatgacaccaatgatcagtcattcaacgactacctatctgcagctaacatgctctaccccattcctgccaatgcaaccaatattcccatttccattccttctcgcaactgggcggctttcagaggctggtcatttaccagactgaaaaccaaagaaactccctctttggggtctggatttgacccctactttgtctattctggttctattccctacctggatggtaccttctacctgaaccacacttttaagaaggtttccatcatgtttgactcttcagtgagctggcctggaaatgacaggttactatctcctaacgaatttgaaataaagcgcactgtggatggcgaaggctacaacgtagcccaatgcaacatgaccaaagactggttcttggtacagatgctcgccaactacaacatcggctatcagggcttctacattccagaaggatacaaagatcgcatgtattcatttttcagaaacttccagcccatgagcaggcaggtggttgatgaggtcaattacaaagacttcaaggccgtcgccataccctaccaacacaacaactctggctttgtgggttacatggctccgaccatgcgccaaggtcaaccctatcccgctaactatccctatccactcattggaacaactgccgtaaatagtgttacgcagaaaaagttcttgtgtgacagaaccatgtggcgcataccgttctcgagcaacttcatgtctatgggggcccttacagacttgggacagaatatgctctatgccaactcagctcatgctctggacatgacctttgaggtggatcccatggatgagcccaccctgctttatcttctcttcgaagttttcgacgtggtcagagtgcatcagccacaccgcggcatcatcgaggcagtctacctgcgtacaccgttctcggccggtaacgctaccacgtaagaagcttcttgcttcttgcaaatagcagctgcaaccatggcctgcggatcccaaaacggctccagcgagcaagagctcagagccattgtccaagacctgggttgcggaccctattttttgggaacctacgataagcgcttcccggggttcatggcccccgataagctcgcctgtgccattgtaaatacggccggacgtgagacggggggagagcactggttggctttcggttggaacccacgttctaacacctgctacctttttgatccttttggattctcggatgatcgtctcaaacagatttaccagtttgaatatgagggtctcctgcgccgcagcgctcttgctaccaaggaccgctgtattacgctggaaaaatctacccagaccgtgcagggtccccgttctgccgcctgcggacttttctgctgcatgttccttcacgcctttgtgcactggcctgaccgtcccatggacggaaaccccaccatgaaattgctaactggagtgccaaacaacatgcttcattctcctaaagtccagcccaccctgtgtgacaatcaaaaagcactctaccattttcttaatacccattcgccttattttcgctcccatcgtacacacatcgaaagggccactgcgttcgaccgtatggatgttcaataatgactcatgtaaacaacgtgttcaataaacatcactttatttttttacatgtatcaaggctctgcattacttatttatttacaagtcgaatgggttctgacgagaatcagaatgacccgcaggcagtgatacgttgcggaactgatacttgggttgccacttgaattcgggaatcaccaacttgggaaccggtatatcgggcaggatgtcactccacagctttctggtcagctgcaaagctccaagcaggtcaggagccgaaatcttgaaatcacaattaggaccagtgctttgagcgcgagagttgcggtacaccggattgcagcactgaaacaccatcagcgacggatgtctcacgcttgccagcacggtgggatctgcaatcatgcccacatccagatcttcagcattggcaatgctgaacggggtcatcttgcaggtctgcctacccatggcgggcacccaattaggcttgtggttgcaatcgcagtgcagggggatcagtatcatcttggcctgatcctgtctgattcctggatacacggctctcatgaaagcatcatattgcttgaaagcctgctgggctttactaccctcggtataaaacatcccgcaggacctgctcgaaaactggttagctgcacagccggcatcattcacacagcagcgggcgtcattgttagctatttgcaccacacttctgccccagcggttttgggtgattttggttcgctcgggattctcctttaaggctcgttgtccgttctcgctggccacatccatctcgataatctgctccttctgaatcataatattgccatgcaggcacttcagcttgccctcataatcattgcagccatgaggccacaacgcacagcctgtacattcccaattatggtgggcgatctgagaaaaagaatgtatcattccctgcagaaatcttcccatcatcgtgctcagtgtcttgtgactagtgaaagttaactggatgcctcggtgctcctcgtttacgtactggtgacagatgcgcttgtattgttcgtgttgctcaggcattagtttaaaagaggttctaagttcgttatccagcctgtacttctccatcagcagacacatcacttccatgcctttctcccaagcagacaccaggggcaagctaatcggattcttaacagtgcaggcagcagctcctttagccagagggtcatctttagcgatcttctcaatgcttcttttgccatccttctcaacgatgcgcacgggcgggtagctgaaacccactgctacaagttgcgcctcttctctttcttcttcgctgtcttgactgatgtcttgcatggggatatgtttggtcttccttggcttctttttggggggtatcggaggaggaggactgtcgctccgttccggagacagggaggattgtgacgtttcgctcaccattaccaactgactgtcggtagaagaacctgaccccacacggcgacaggtgtttctcttcgggggcagaggtggaggcgattgcgaagggctgcggtccgacctggaaggcggatgactggcagaaccccttccgcgttcgggggtgtgctccctgtggcggtcgcttaactgatttccttcgcggctggccattgtgttctcctaggcagagaaacaacagacatggaaactcagccattgctgtcaacatcgccacgagtgccatcacatctcgtcctcagcgacgaggaaaaggagcagagcttaagcattccaccgcccagtcctgccaccacctctaccctagaagataaggaggtcgacgcatctcatgacatgcagaataaaaaagcgaaagagtctgagacagacatcgagcaagacccgggctatgtgacaccggtggaacacgaggaagagttgaaacgctttctagagagagaggatgaaaactgcccaaaacaacgagcagataactatcaccaagatgctggaaatagggatcagaacaccgactacctcatagggcttgacggggaagacgcgctccttaaacatctagcaagacagtcgctcatagtcaaggatgcattattggacagaactgaagtgcccatcagtgtggaagagctcagccgcgcctacgagcttaacctcttttcacctcgtactccccccaaacgtcagccaaacggcacctgcgagccaaatcctcgcttaaacttttatccagcttttgctgtgccagaagtactggctacctatcacatcttttttaaaaatcaaaaaattccagtctcctgccgcgctaatcgcacccgcgccgatgccctactcaatctgggacctggttcacgcttacctgatatagcttccttggaagaggttccaaagatcttcgagggtctgggcaataatgagactcgggccgcaaatgctctgcaaaagggagaaaatggcatggatgagcatcacagcgttctggtggaattggaaggcgataatgccagactcgcagtactcaagcgaagcatcgaggtcacacacttcgcatatcccgctgtcaacctgccccctaaagtcatgacggcggtcatggaccagttactcattaagcgcgcaagtcccctttcagaagacatgcatgacccagatgcctgtgatgagggtaaaccagtggtcagtgatgagcagctaacccgatggctgggcaccgactctcccagggatttggaagagcgtcgcaagcttatgatggccgtggtgctggttaccgtagaactagagtgtctccgacgtttctttaccgattcagaaaccttgcgcaaactcgaagagaatctgcactacacttttagacacggctttgtgcggcaggcatgcaagatatctaacgtggaactcaccaacctggtttcctacatgggtattctgcatgagaatcgcctaggacaaagcgtgctgcacagcaccctgaagggggaagcccgccgtgattacatccgcgattgtgtctatctgtacctgtgccacacgtggcaaaccggcatgggtgtatggcagcaatgtttagaagaacagaacttgaaagagcttgacaagctcttacagaaatctcttaaggttctgtggacagggttcgacgagcgcaccgtcgcttccgacctggcagacctcatcttcccagagcgtctcagggttactttgcgaaacggattgcctgactttatgagccagagcatgcttaacaattttcgctctttcatcctggaacgctccggtatcctgcccgccacctgctgcgcactgccctccgactttgtgcctctcacctaccgcgagtgccccccgccgctatggagtcactgctacctgttccgtctggccaactatctctcctaccactcggatgtgatcgaggatgtgagcggagacggcttgctggagtgtcactgccgctgcaatctgtgcacgccccaccggtccctagcttgcaacccccagttgatgagcgaaacccagataataggcacctttgaattgcaaggccccagcagccaaggcgatgggtcttctcctgggcaaagtttaaaactgaccccgggactgtggacctccgcctacttgcgcaagtttgctccggaagattaccacccctatgaaatcaagttctatgaggaccaatcacagcctccaaaggccgaactttcggcctgcgtcatcacccagggggcaattctggcccaattgcaagccatccaaaaatcccgccaagaatttctactgaaaaagggtaagggggtctaccttgacccccagaccggcgaggaactcaacacaaggttccctcaggatgtcccaacgacgagaaaacaagaagttgaaggtgcagccgccgcccccagaagatatggaggaagattgggacagtcaggcagaggaggcggaggaggacagtctggaggacagtctggaggaagacagtttggaggaggaaaacgaggaggcagaggaggtggaagaagtaaccgccgacaaacagttatcctcggctgcggagacaagcaacagcgctaccatctccgctccgagtcgaggaacccggcggcgtcccagcagtagatgggacgagaccggacgcttcccgaacccaaccagcgcttccaagaccggtaagaaggatcggcagggatacaagtcctggcgggggcataagaatgccatcatctcctgcttgcatgagtgcgggggcaacatatccttcacgcggcgctacttgctattccaccatggggtgaactttccgcgcaatgttttgcattactaccgtcacctccacagcccctactatagccagcaaatcccggcagtctcgacagataaagacagcggcggcgacctccaacagaaaaccagcagcggcagttagaaaatacacaacaagtgcagcaacaggaggattaaagattacagccaacgagccagcgcaaacccgagagttaagaaatcggatctttccaaccctgtatgccatcttccagcagagtcggggtcaagagcaggaactgaaaataaaaaaccgatctctgcgttcgctcaccagaagttgtttgtatcacaagagcgaagatcaacttcagcgcactctcgaggacgccgaggctctcttcaacaagtactgcgcgctgactcttaaagagtaggcagcgaccgcgcttattcaaaaaaggcgggaattacatcatcctcgacatgagtaaagaaattcccacgccttacatgtggagttatcaaccccaaatgggattggcggcaggcgcctcccaggactactccacccgcatgaattggctcagcgccgggccttctatgatttctcgagttaatgatatacgcgcctaccgaaaccaaatacttttggaacagtcagctcttaccaccacgccccgccaacaccttaatcccagaaattggcccgccgccctagtgtaccaggaaagtcccgctcccaccactgtattacttcctcgagacgcccaggccgaagtccaaatgactaatgcaggtgcgcagttagctggcggctccaccctatgtcgtcacaggcctcggcataatataaaacgcctgatgatcagaggccgaggtatccagctcaacgacgagtcggtgagctctccgcttggtctacgaccagacggaatctttcagattgccggctgcgggagatcttccttcacccctcgtcaggctgttctgactttggaaagttcgtcttcgcaaccccgctcgggcggaatcgggaccgttcaatttgtggaggagtttactccctctgtctacttcaaccccttctccggatctcctgggcattacccggacgagttcataccgaacttcgacgcgattagcgagtcagtggacggctacgattgatgtctggtgacgcggctgagctatctcggctgcgacatctagaccactgccgccgctttcgctgctttgcccgggaactcattgagttcatctacttcgaactccccaaggatcaccctcaaggtccggcccacggagtgcggatttctatcgaaggcaaaatagactctcgcctgcaacgaattttctcccagcggcccgtgctgatcgagcgagaccagggaaacaccacggtttccatctactgcatttgtaatcaccccggattgcatgaaagcctttgctgtcttatgtgtactgagtttaataaaaactgaattaagactctcctacggactgccgcttcttcaacccggattttacaaccagaagaacgaaacttttcctgtcgtccaggactctgttaacttcacctttcctactcacaaactagaagctcaacgactacaccgcttttccagaagcattttccctactaatactactttcaaaaccggaggtgagctccaaggtcttcctacagaaaacccttgggtggaagcgggccttgtagtgctaggaattcttgcgggtgggcttgtgattattctttgctacctatacacaccttgcttcactttcttagtggtgttgtggtattggtttaaaaaatggggcccatactagtcttgcttgttttactttcgcttttggaaccgggttctgccaattacgatccatgtctagacttcgacccagaaaactgcacacttacttttgcacccgacacaagccgcatctgtggagttcatcgcctctcttacgaacttggcccccaacgacaaaaatttacctgcatggtgggaatcaaccccatagttatcacccagcaaagtggagatactaagggttgcattcactgctcctgcgattccatcgagtgcacctacaccctgctgaagaccctatgcggcctaagagacctgctaccaatgaattaaaaaatgattaataaaaaatcacttacttgaaatcagcaataaggtctctgttgaaattttctcccagcagcacctcacttccctcttcccaactctggtattctaaaccccgttcagcggcatactttctccatactttaaaggggatgtcaaattttagctcctctcctgtacccacaatcttcatgtctttcttcccagatgaccaagagagtccggctcagtgactccttcaaccctgtctacccctatgaagatgaaagcacctcccaacacccctttataaacccagggtttatttccccaaatggcttcacacaaagcccaaacggagttcttactttaaaatgtttaaccccactaacaaccacaggcggatctctacagctaaaagtgggagggggacttacagtggatgacaccaacggttttttgaaagaaaacataagtgccaccacaccactcgttaagactggtcactctataggtttaccactaggagccggattgggaacgaatgaaaataaactttgtatcaaattaggacaaggacttacattcaattcaaacaacatttgcattgatgacaatattaacaccttatggacaggagtcaaccccaccgaagccaactgtcaaatcatgaactccagtgaatctaatgattgcaaattaattctaacactagttaaaactggagcactagtcactgcatttgtttatgttataggagtatctaacaattttaatatgctaactacacacagaaatataaattttactgcagagctgtttttcgattctactggtaatttactaactagactctcatccctcaaaactccacttaatcataaatcaggacaaaacatggctactggtgccattactaatgctaaaggtttcatgcccagcacgactgcctatcctttcaatgataattctagagaaaaagaaaactacatttacggaacttgttactacacagctagtgatcgcactgcttttcccattgacatatctgtcatgcttaaccgaagagcaataaatgacgagacatcatattgtattcgtataacttggtcctggaacacaggagatgccccagaggtgcaaacctctgctacaaccctagtcacctccccatttaccttttactacatcagagaagacgactgacaaataaagtttgcgatcgccaggcccaccatgtgtcaccagcagttggtcatctcttggttttccctggtttttctggcatctcccctcgtggccatatgggaactgaagaaagatgtttatgtcgtagaattggattggtatccggatgcccctggagaaatggtggtcctcacctgtgacacccctgaagaagatggtatcacctggaccttggaccagagcagtgaggtcttaggctctggcaaaaccctgaccatccaagtcaaagagtttggagatgctggccagtacacctgtcacaaaggaggcgaggttctaagccattcgctcctgctgcttcacaaaaaggaagatggaatttggtccactgatattttaaaggaccagaaagaacccaaaaataagacctttctaagatgcgaggccaagaattattctggacgtttcacctgctggtggctgacgacaatcagtactgatttgacattcagtgtcaaaagcagcagaggctcttctgacccccaaggggtgacgtgcggagctgctacactctctgcagagagagtcagaggggacaacaaggagtatgagtactcagtggagtgccaggaggacagtgcctgcccagctgctgaggagagtctgcccattgaggtcatggtggatgccgttcacaagctcaagtatgaaaactacaccagcagcttcttcatcagggacatcatcaaacctgacccacccaagaacttgcagctgaagccattaaagaattctcggcaggtggaggtcagctgggagtaccctgacacctggagtactccacattcctacttctccctgacattctgcgttcaggtccagggcaagagcaagagagaaaagaaagatagagtcttcacggacaagacctcagccacggtcatctgccgcaaaaatgccagcattagcgtgcgggcccaggaccgctactatagctcatcttggagcgaatgggcatctgtgccctgcagtggagggggcggcagcgggggaggcggcagcggcggcgggggatcgagaaacctccccgtggccactccagacccaggaatgttcccatgccttcaccactcccaaaacctgctgagggccgtcagcaacatgctccagaaggccagacaaactctagaattttacccttgcacttctgaagagattgatcatgaagatatcacaaaagataaaaccagcacagtggaggcctgtttaccattggaattaaccaagaatgagagttgcctaaattccagagagacctctttcataactaatgggagttgcctggcctccagaaagacctcttttatgatggccctgtgccttagtagtatttatgaagacttgaagatgtaccaggtggagttcaagaccatgaatgcaaagcttctgatggatcctaagaggcagatctttctagatcaaaacatgctggcagttattgatgagctgatgcaggccctgaatttcaacagtgagactgtgccacaaaaatcctcccttgaagaaccggatttttataaaactaaaatcaagctctgcatacttcttcatgctttcagaattcgggcagtgactattgatagagtgatgagctatctgaatgcttccggaagcggagagggcagaggaagtctgctaacatgcggtgacgtcgaggagaatcctggacctaagaaaagtggtgttcttttcctcttgggcatcatcttgctggttctgattggagtgcaaggaaccccagtagtgagaaagggtcgctgttcctgcatcagcaccaaccaagggactatccacctacaatccttgaaagaccttaaacaatttgccccaagcccttcctgcgagaaaattgaaatcattgctacactgaagaatggagttcaaacatgtctaaacccagattcagcagatgtgaaggaactgattaaaaagtgggagaaacaggtcagccaaaagaaaaagcaaaagaatgggaaaaaacatcaaaaaaagaaagttctgaaagttcgaaaatctcaacgttctcgtcaaaagaagactacaggaagcggagtgaaacagactttgaattttgaccttctcaagttggcgggagacgtggagtccaaccctggacctgccttgacctttgctttactggtggccctcctggtgctcagctgcaagtcaagctgctctgtgggctgtgatctgcctcaaacccacagcctgggtagcaggaggaccttgatgctcctggcacagatgaggagaatctctcttttctcctgcttgaaggacagacatgactttggatttccccaggaggagtttggcaaccagttccaaaaggctgaaaccatccctgtcctccatgagatgatccagcagatcttcaatctcttcagcacaaaggactcatctgctgcttgggatgagaccctcctagacaaattctacactgaactctaccagcagctgaatgacctggaagcctgtgtgatacagggggtgggggtgacagagactcccctgatgaaggaggactccattctggctgtgaggaaatacttccaaagaatcactctctatctgaaagagaagaaatacagcccttgtgcctgggaggttgtcagagcagaaatcatgagatctttttctttgtcaacaaacttgcaagaaagtttaagaagtaaggaaggaagcggacagtgtactaattatgctctcttgaaattggctggagatgttgagagcaaccctggacctgactggacctggcgcatcctgttcttggtggcagctgctacgggagctcattccaactgggtgaatgtaataagtgatttgaaaaaaattgaagatcttattcaatctatgcatattgatgctactttatatacggaaagtgatgttcaccccagttgcaaagtaacagcaatgaagtgctttctcttggagttacaagttatttcacttgagtccggagatgcaagtattcatgatacagtagaaaatctgatcatcctagcaaacaacagtttgtcttctaatgggaatgtaacagaatctggatgcaaagaatgtgaggaactggaggaaaaaaatattaaagaatttttgcagagttttgtacatattgtccaaatgttcatcaacacttcttaagctagcttgactgactgagatacagcgtaccttcagctcacagacatgataagatacattgatgagtttggacaaaccacaactagaatgcagtgaaaaaaatgctttatttgtgaaatttgtgatgctattgctttatttgtaaccattataagctgcaataaacaagttaacaacaacaattgcattcattttatgtttcaggttcagggggaggtgtgggaggttttttaaagcaagtaaaacctctacaaatgtggtagtcgtcagctatcctgcaggaacttgtttatttgaaaatcaattcacaaaatccgagtagttattttgcctcccccttcccatttaacagaatacaccaatctctccccacgcacagctttaaacatttggataccattagatatagacatggttttagattccacattccaaacagtttcagagcgagccaatctggggtcagtgatagataaaaatccatcgggatagtcttttaaagcgctttcacagtccaactgctgcggatgcgactccggagtctggatcacggtcatctggaagaagaacgatgggaatcataatccgaaaacggtatcggacgattgtgtctcatcaaacccacaagcagccgctgtctgcgtcgctccgtgcgactgctgtttatgggatcagggtccacagtgtcctgaagcatgattttaatagcccttaacatcaactttctggtgcgatgcgcgcagcaacgcattctgatttcactcaaatctttgcagtaggtacaacacattattacaatattgtttaataaaccataattaaaagcgctccagccaaaactcatatctgatataatcgcccctgcatgaccatcataccaaagtttaatataaattaaatgacgttccctcaaaaacacactacccacatacatgatctcttttggcatgtgcatattaacaatctgtctgtaccatggacaacgttggttaatcatgcaacccaatataaccttccggaaccacactgccaacaccgctcccccagccatgcattgaagtgaaccctgctgattacaatgacaatgaagaacccaattctctcgaccgtgaatcacttgagaatgaaaaatatctatagtggcacaacatagacataaatgcatgcatcttctcataatttttaactcctcaggatttagaaacatatcccagggaataggaagctcttgcagaacagtaaagctggcagaacaaggaagaccacgaacacaacttacactatgcatagtcatagtatcacaatctggcaacagcgggtggtcttcagtcatagaagctcgggtttcattttcctcacaacgtggtaactgggctctggtgtaagggtgatgtctggcgcatgatgtcgagcgtgcgcgcaaccttgtcataatggagttgcttcctgacattctcgtattttgtatagcaaaacgcggccctggcagaacacactcttcttcgccttctatcctgccgcttagcgtgttccgtgtgatagttcaagtacaaccacactcttaagttggtcaaaagaatgctggcttcagttgtaatcaaaactccatcgcatctaatcgttctgaggaaatcatccaagcaatgcaactggattgtgtttcaagcaggagaggagagggaagagacggaagaaccatgttaatttttattccaaacgatctcgcagtacttcaaattgtagatcgcgcagatggcatctctcgcccccactgtgttggtgaaaaagcacagctagatcaaaagaaatgcgattttcaaggtgctcaacggtggcttccagcaaagcctccacgcgcacatccaagaacaaaagaataccaaaagaaggagcattttctaactcctcaatcatcatattacattcctgcaccattcccagataattttcagctttccagccttgaattattcgtgtcagttcttgtggtaaatccaatccacacattacaaacaggtcccggagggcgccctccaccaccattcttaaacacaccctcataatgacaaaatatcttgctcctgtgtcacctgtagcgaattgagaatggcaacatcaattgacatgcccttggctctaagttcttctttaagttctagttgtaaaaactctctcatattatcaccaaactgcttagccagaagccccccgggaacaagagcaggggacgctacagtgcagtacaagcgcagacctccccaattggctccagcaaaaacaagattggaataagcatattgggaaccgccagtaatatcatcgaagttgctggaaatataatcaggcagagtttcttgtaaaaattgaataaaagaaaaatttgccaaaaaaacattcaaaacctctgggatgcaaatgcaataggttaccgcgctgcgctccaacattgttagttttgaattagtctgcaaaaataaaaaaaaaaacaagcgtcatatcatagtagcctgacgaacagatggataaatcagtctttccatcacaagacaagccacagggtctccagctcgaccctcgtaaaacctgtcatcatgattaaacaacagcaccgaaagttcctcgcggtgaccagcatgaataattcttgatgaagcatacaatccagacatgttagcatcagttaacgagaaaaaacagccaacatagcctttgggtataattatgcttaatcgtaagtatagcaaagccacccctcgcggatacaaagtaaaaggcacaggagaataaaaaatataattatttctctgctgctgttcaggcaacgtcgcccccggtccctctaaatacacatacaaagcctcatcagccatggcttaccagacaaagtacagcgggcacacaaagcacaagctctaaagtgactctccaacctctccacaatatatatatacacaagccctaaactgacgtaatgggagtaaagtgtaaaaaatcccgccaaacccaacacacaccccgaaactgcgtcaccagggaaaagtacagtttcacttccgcaatcccaacaggcgtaacttcctctttctcacggtacgtgatatcccactaacttgcaacgtcattttcccacggtcgcaccgccccttttagccgttaaccccacagccaatcaccacacgatccacactttttaaaatcacctcatttacatattggcaccattccatctataaggtatattatatagataga

SEQ ID NO: 103 - DNA, 36253 bp, Artificial Sequence
  Genome sequence of NG-760 virus
tctatctatataatataccttatagatggaatggtgccaatatgtaaatgaggtgattttaaaaagtgtggatcgtgtggtgattggctgtggggttaacggctaaaaggggcggtgcgaccgtgggaaaatgacgttttgtgggggtggagtttttttgcaagttgtcgcgggaaatgtgacgcataaaaaggcttttttctcacggaactacttagttttcccacggtatttaacaggaaatgaggtagttttgaccggatgcaagtgaaaattgttgattttcgcgcgaaaactgaatgaggaagtgtttttctgaataatgtggtatttatggcagggtggagtatttgttcagggccaggtagactttgacccattacgtggaggtttcgattaccgtgttttttacctgaatttccgcgtaccgtgtcaaagtcttctgtttttacgtaggtgtcagctgatcgctagggtatttatacctcagggtttgtgtcaagaggccactcttgagtgccagcgagaagagttttctcctctgcgccggcagtttaataataaaaaaatgagagatttgcgatttctgcctcaggaaataatctctgctgagactggaaatgaaatattggagcttgtggtgcacgccctgatgggagacgatccggagccacctgtgcagctttttgagcctcctacgcttcaggaactgtatgatttagaggtagagggatcggaggattctaatgaggaagctgtaaatggcttttttaccgattctatgcttttagctgctaatgaagggttagaattagatccgcctttggacacttttgatactccaggggtaattgtggaaagcggtacaggtgtaagaaaattacctgatttgagttccgtggactgtgatttgcactgctatgaagacgggtttcctccgagtgatgaggaggaccatgaaaaggagcagtccatgcagactgcagcgggtgagggagtgaaggctgccaatgttggttttcagttggattgcccggagcttcctggacatggctgtaagtcttgtgaatttcacaggaaaaatactggagtaaaggaactgttatgttcgctttgttatatgagaacgcactgccactttatttacagtaagtgtgtttaagttaaaatttaaaggaatatgctgtttttcacatgtatattgagtgtgagttttgtgcttcttattataggtcctgtgtctgatgctgatgaatcaccatctcctgattctactacctcacctcctgagattcaagcacctgttcctgtggacgtgcgcaagcccattcctgtgaagcttaagcctgggaaacgtccagcagtggaaaaacttgaggacttgttacagggtggggacggacctttggacttgagtacacggaaacgtccaagacaataagtgttccatatccgtgtttacttaaggtgacgtcaatatttgtgtgacagtgcaatgtaataaaaatatgttaactgttcactggtttttattgctttttgggcggggactcaggtatataagtagaagcagacctgtgtggttagctcataggagctggctttcatccatggaggtttgggccattttggaagaccttaggaagactaggcaactgttagagaacgcttcggacggagtctccggtttttggagattctggttcgctagtgaattagctagggtagtttttaggataaaacaggactataaacaagaatttgaaaagttgttggtagattgcccaggactttttgaagctcttaatttgggccatcaggttcactttaaagaaaaagttttatcagttttagacttttcaaccccaggtagaactgctgctgctgtggcttttcttacttttatattagataaatggatcccgcagactcatttcagcaggggatacgttttggatttcatagccacagcattgtggagaacatggaaggttcgcaagatgaggacaatcttaggttactggccagtgcagcctttgggtgtagcgggaatcctgaggcatccaccggtcatgccagcggttctggaggaggaacagcaagaggacaacccgagagccggcctggaccctccagtggaggaggcggagtagctgacttgtctcctgaactgcaacgggtgcttactggatctacgtccactggacgggataggggcgttaagagggagagggcatctagtggtactgatgctagatctgagttggctttaagtttaatgagtcgcagacgtcctgaaaccatttggtggcatgaggttcagaaagagggaagggatgaagtttctgtattgcaggagaaatattcactggaacaggtgaaaacatgttggttggagcctgaggatgattgggaggtggccattaaaaattatgccaagatagctttgaggcctgataaacagtataagattactagacggattaatatccggaatgcttgttacatatctggaaatggggctgaggtggtaatagatactcaagacaaggcagttattagatgctgcatgatggatatgtggcctggggtagtcggtatggaagcagtaacttttgtaaatgttaagtttaggggagatggttataatggaatagtgtttatggccaataccaaacttatattgcatggttgtagcttttttggtttcaacaatacctgtgtagatgcctggggacaggttagtgtacggggatgtagtttctatgcgtgttggattgccacagctggcagaaccaagagtcaattgtctctgaagaaatgcatatttcaaagatgtaacctgggcattctgaatgaaggcgaagcaagggtccgccactgcgcttctacagatactggatgttttattttgattaagggaaatgccagcgtaaagcataacatgatttgcggtgcttccgatgagaggccttatcaaatgctcacttgtgctggtgggcattgtaatatgctggctactgtgcatattgtttcccatcaacgcaaaaaatggcctgtttttgatcacaatgtgatgacgaagtgtaccatgcatgcaggtgggcgtagaggaatgtttatgccttaccagtgtaacatgaatcatgtgaaagtgttgttggaaccagatgccttttccagaatgagcctaacaggaatttttgacatgaacatgcaaatctggaagatcctgaggtatgatgatacgagatcgagggtacgcgcatgcgaatgcggaggcaagcatgccaggttccagccggtgtgtgtagatgtgactgaagatctcagaccggatcatttggttattgcccgcactggagcagagttcggatccagtggagaagaaactgactaaggtgagtattgggaaaactttggggtgggattttcagatggacagattgagtaaaaatttgttttttctgtcttgcagctgtcatgagtggaaacgcttcttttaaggggggagtcttcagcccttatctgacagggcgtctcccatcctgggcaggagttcgtcagaatgttatgggatctactgtggatggaagacccgtccaacccgccaattcttcaacgctgacctatgctactttaagttcttcacctttggacgcagctgcagctgccgccgccgcttctgttgccgctaacactgtgcttggaatgggttactatggaagcatcatggctaattccacttcctctaataacccttctaccctgactcaggacaagttacttgtccttttggcccagctggaggctttgacccaacgtctgggtgaactttctcagcaggtggtcgagttgcgagtacaaactgagtctgctgtcggcacggcaaagtctaaataaaaaaatcccagaatcaatgaataaataaacaagcttgttgttgatttaaaatcaagtgtttttatttcatttttcgcgcacggtatgccctagaccaccgatctctatcattgagaactcggtggattttttccaggatcctatagaggtgggattgaatgtttagatacatgggcattaggccgtctttggggtggagatagctccattgaagggattcatgctccggggtagtgttgtaaatcacccagtcataacaaggtcgcagtgcatggtgttgcacaatatcttttagaagtaggctgattgccacagataagcccttggtgtaggtgtttacaaaccggttgagctgggatgggtgcattcggggtgaaattatgtgcattttggattggatttttaagttggcaatattgccgccaagatcccgtcttgggttcatgttatgaaggaccaccaagacggtgtatccggtacatttaggaaatttatcgtgcagcttggatggaaaagcgtggaaaaatttggagacacccttgtgtcctccaagattttccatgcactcatccatgataatagcaatggggccgtgggcagcggcgcgggcaaacacgttccgtgggtctgacacatcatagttatgttcctgagttaaatcatcataagccattttaatgaatttggggcggagagtaccagattggggtatgaatgttccttcgggccccggagcatagttcccctcacagatttgcatttcccaagctttcagttccgagggtggaatcatgtccacctggggggctatgaaaaacaccgtttctggggcgggggtgattaattgtgatgatagcaaatttctgagcaattgagatttgccacatccggtggggccataaatgattccgattacgggttgcaggtggtagtttagggaacggcaactgccgtcttctcgaagcaagggggccacctcgttcatcatttcccttacatgcatattttcccgcaccaaatccattaggaggcgctctcctcctagtgatagaagttcttgtagtgaggaaaagtttttcagcggtttcagaccgtcagccatgggcattttggagagagtttgctgcaaaagttctagtctgttccacagttcagtgatgtgttctatggcatctcgatccagcagacctcctcgtttcgcgggtttggacggctcctggaatagggtatgagacgatgggcgtccagcgctgccagggttcggtccttccagggtctcagtgttcgagtcagggttgtttccgtcacagtgaaggggtgtgcgcctgcttgggcgcttgccagggtgcgcttcagactcatcctgctggtcgaaaacttctgtcgcttggcgccctgtatgtcggccaagtagcagtttaccatgagttcgtagttgagcgcctcggctgcgtggcctttggcgcggagcttacctttggaagttttcttgcataccgggcagtataggcatttcagcgcatacaacttgggcgcaaggaaaacggattctggggagtatgcatctgcgccgcaggaggcgcaaacagtttcacattccaccagccaggttaaatccggttcattggggtcaaaaacaagttttccgccatattttttgatgcgtttcttacctttggtctccatgagttcgtgtcctcgttgagtgacaaacaggctgtccgtgtccccgtagactgattttacaggcctcttctccagtggagtgcctcggtcttcttcgtacaggaactctgaccactctgatacaaaggcgcgcgtccaggccagcacaaaggaggctatgtgggaggggtagcgatcgttgtcaaccagggggtccaccttttccaaagtatgcaaacacatgtcaccctcttcaacatccaggaatgtgattggcttgtaggtgtatttcacgtgacctggggtccccgctgggggggtataaaagggggcggttctttgctcttcctcactgtcttccggatcgctgtccaggaacgtcagctgttggggtaggtattccctctcgaaggcgggcatgacctctgcactcaggttgtcagtttctaagaacgaggaggatttgatattgacagtgccggttgagatgcctttcatgaggttttcgtccatctggtcagaaaacacaatttttttattgtcaagtttggtggcaaatgatccatacagggcgttggataaaagtttggcaatggatcgcatggtttggttcttttccttgtccgcgcgctctttggcggcgatgttgagttggacatactcgcgtgccaggcacttccattcggggaagatagttgttaattcatctggcacgattctcacttgccaccctcgattatgcaaggtaattaaatccacactggtggccacctcgcctcgaaggggttcattggtccaacagagcctacctcctttcctagaacagaaagggggaagtgggtctagcataagttcatcgggagggtctgcatccatggtaaagattcccggaagtaaatccttatcaaaatagctgatgggagtggggtcatctaaggccatttgccattctcgagctgccagtgcgcgctcatatgggttaaggggactgccccatggcatgggatgggtgagtgcagaggcatacatgccacagatgtcatagacgtagatgggatcctcaaagatgcctatgtaggttggatagcatcgcccccctctgatacttgctcgcacatagtcatatagttcatgtgatggcgctagcagccccggacccaagttggtgcgattgggtttttctgttctgtagacgatctggcgaaagatggcgtgagaattggaagagatggtgggtctttgaaaaatgttgaaatgggcatgaggtagacctacagagtctctgacaaagtgggcataagattcttgaagcttggttaccagttcggcggtgacaagtacgtctagggcgcagtagtcaagtgtttcttgaatgatgtcataacctggttggtttttcttttcccacagttcgcggttgagaaggtattcttcgcgatccttccagtactcttctagcggaaacccgtctttgtctgcacggtaagatcctagcatgtagaactgattaactgccttgtaagggcagcagcccttctctacgggtagagagtatgcttgagcagcttttcgtagcgaagcgtgagtaagggcaaaggtgtctctgaccatgactttgaggaattggtatttgaagtcgatgtcgtcacaggctccctgttcccagagttggaagtctacccgtttcttgtaggcggggttgggcaaagcgaaagtaacatcattgaagagaatcttgccggccctgggcatgaaattgcgagtgatgcgaaaaggctgtggtacttccgctcggttattgataacctgggcagctaggacgatctcgtcgaaaccgttgatgttgtgtcctacgatgtataattctatgaaacgcggcgtgcctctgacgtgaggtagcttactgagctcatcaaaggttaggtctgtggggtcagataaggcgtagtgttcgagagcccattcgtgcaggtgaggattcgctttaaggaaggaggaccagaggtccactgccagtgctgtttgtaactggtcccggtactgacgaaaatgccgtccgactgccattttttctggggtgacgcaatagaaggtttgggggtcctgccgccagcgatcccacttgagttttatggcgaggtcataggcgatgttgacgagccgctggtctccagagagtttcatgaccagcatgaaggggattagctgcttgccaaaggaccccatccaggtgtaggtttccacatcgtaggtgagaaagagcctttctgtgcgaggatgagagccaatcgggaagaactggatctcctgccaccagttggaggaatggctgttgatgtgatggaagtagaactccctgcgacgcgccgagcattcatgcttgtgcttgtacagacggccgcagtagtcgcagcgttgcacgggttgtatctcgtgaatgagttgtacctggcttcccttgacgagaaatttcagtgggaagccgaggcctggcgattgtatctcgtgctttactatgttgtctgcatcggcctgttcatcttctgtctcgatggtggtcatgctgacgagccctcgcgggaggcaagtccagacctcggcgcggcaggggcggagctcgaggacgagagcgcgcaggctggagctgtccagggtcctgagacgctgcggactcaggttagtaggcagtgtcaggagattaacttgcatgatcttttggagggcgtgcgggaggttcagatagtacttgatctcaacgggtccgttggtggagatgtcgatggcttgcagggttccgtgtcccttgggcgctaccaccgtgcccttgtttttcattttggacggcggtggctctgttgcttcttgcatgtttagaagcggtgtcgagggcgcgcaccgggcggcaggggcggctcgggacccggcggcatggctggcagtggtacgtcggcgccgcgcgcgggtaggttctggtactgcgccctgagaagactcgcatgcgcgacgacgcggcggttgacatcctggatctgacgcctctgggtgaaagctaccggccccgtgagcttgaacctgaaagagagttcaacagaatcaatctcggtatcgttgacggcggcttgcctaaggatttcttgcacgtcaccagagttgtcctggtaggcgatctccgccatgaactgctcgatctcttcctcttgaagatctccgcggcccgctctctcgacggtggccgcgaggtcgttggagatgcgcccaatgagttgagagaatgcattcatgcccgcctcgttccagacgcggctgtagaccacggcccccacgggatctctcgcgcgcatgaccacctgggcgaggttgagctccacgtggcgggtgaagaccgcatagttgcataggcgctggaaaaggtagttgagtgtggtggcgatgtgctcggtgacgaagaaatacatgatccatcgtctcagcggcatctcgctgacatcgcccagagcttccaagcgctccatggcctcgtagaagtccacggcaaaattaaaaaactgggagtttcgcgcggacacggtcaactcctcttccagaagacggataagttcggcgatggtggtgcgcacctcgcgctcgaaagcccctgggatttcttcctcaatctcttcttcttccactaacatctcttcctcttcaggtggggctgcaggaggagggggaacgcggcgacgccggcggcgcacgggcagacggtcgatgaatctttcaatgacctctccgcggcggcggcgcatggtttcagtgacggcgcggccgttctcgcgcggtcgcagagtaaaaacaccgccgcgcatctccttaaagtggtgactgggaggttctccgtttgggagggagagggcgctgattatacattttattaattggcccgtagggactgcacgcagagatctgatcgtgtcaagatccacgggatctgaaaacctttcgacgaaagcgtctaaccagtcacagtcacaaggtaggctgagtacggcttcttgtgggcgggggtggttatgtgttcggtctgggtcttctgtttcttcttcatctcgggaaggtgagacgatgctgctggtgatgaaattaaagtaggcagttctaagacggcggatggtggcgaggagcaccaggtctttgggtccggcttgctggatacgcaggcgattggccattccccaagcattatcctgacatctagcaagatctttgtagtagtcttgcatgagccgttctacgggcacttcttcctcacccgttctgccatgcatacgtgtgagtccaaatccgcgcattggttgtaccagtgccaagtcagctacgactctttcggcgaggatggcttgctgtacttgggtaagggtggcttgaaagtcatcaaaatccacaaagcggtggtaagctcctgtattaatggtgtaagcacagttggccatgactgaccagttaactgtctggtgaccagggcgcacgagctcggtgtatttaaggcgcgaataggcgcgggtgtcaaagatgtaatcgttgcaggtgcgcaccagatactggtaccctataagaaaatgcggcggtggttggcggtagagaggccatcgttctgtagctggagcgccaggggcgaggtcttccaacataaggcggtgatagccgtagatgtacctggacatccaggtgattcctgcggcggtagtagaagcccgaggaaactcgcgtacgcggttccaaatgttgcgtagcggcatgaagtagttcattgtaggcacggtttgaccagtgaggcgcgcgcagtcattgatgctctatagacacggagaaaatgaaagcgttcagcgactcgactccgtagcctggaggaacgtgaacgggttgggtcgcggtgtaccccggttcgagacttgtactcgagccggccggagccgcggctaacgtggtattggcactcccgtctcgacccagcctacaaaaatccaggatacggaatcgagtcgttttgctggtttccgaatggcagggaagtgagtcctattttttttttttgccgctcagatgcatcccgtgctgcgacagatgcgcccccaacaacagcccccctcgcagcagcagcagcagcaatcacaaaaggctgtccctgcaactactgcaactgccgccgtgagcggtgcgggacagcccgcctatgatctggacttggaagagggcgaaggactggcacgtctaggtgcgccttcacccgagcggcatccgcgagttcaactgaaaaaagattctcgcgaggcgtatgtgccccaacagaacctatttagagacagaagcggcgaggagccggaggagatgcgagcttcccgctttaacgcgggtcgtgagctgcgtcacggtttggaccgaagacgagtgttgcgggacgaggatttcgaagttgatgaaatgacagggatcagtcctgccagggcacacgtggctgcagccaaccttgtatcggcttacgagcagacagtaaaggaagagcgtaacttccaaaagtcttttaataatcatgtgcgaaccctgattgcccgcgaagaagttacccttggtttgatgcatttgtgggatttgatggaagctatcattcagaaccctactagcaaacctctgaccgcccagctgtttctggtggtgcaacacagcagagacaatgaggctttcagagaggcgctgctgaacatcaccgaacccgaggggagatggttgtatgatcttatcaacattctacagagtatcatagtgcaggagcggagcctgggcctggccgagaaggtggctgccatcaattactcggttttgagcttgggaaaatattacgctcgcaaaatctacaagactccatacgttcccatagacaaggaggtgaagatagatgggttctacatgcgcatgacgctcaaggtcttgaccctgagcgatgatcttggggtgtatcgcaatgacagaatgcatcgcgcggttagcgccagcaggaggcgcgagttaagcgacagggaactgatgcacagtttgcaaagagctctgactggagctggaaccgagggtgagaattacttcgacatgggagctgacttgcagtggcagcctagtcgcagggctctgagcgccgcgacggcaggatgtgagcttccttacatagaagaggcggatgaaggcgaggaggaagagggcgagtacttggaagactgatggcacaacccgtgttttttgctagatggaacagcaagcaccggatcccgcaatgcgggcggcgctgcagagccagccgtccggcattaactcctcggacgattggacccaggccatgcaacgtatcatggcgttgacgactcgcaaccccgaagcctttagacagcaaccccaggccaaccgtctatcggccatcatggaagctgtagtgccttcccgctctaatcccactcatgagaaggtcctggccatcgtgaacgcgttggtggagaacaaagctattcgtccagatgaggccggactggtatacaacgctctcttagaacgcgtggctcgctacaacagtagcaatgtgcaaaccaatttggaccgtatgataacagatgtacgcgaagccgtgtctcagcgcgaaaggttccagcgtgatgccaacctgggttcgctggtggcgttaaatgctttcttgagtactcagcctgctaatgtgccgcgtggtcaacaggattatactaactttttaagtgctttgagactgatggtatcagaagtacctcagagcgaagtgtatcagtccggtcctgattacttctttcagactagcagacagggcttgcagacggtaaatctgagccaagcttttaaaaaccttaaaggtttgtggggagtgcatgccccggtaggagaaagagcaaccgtgtctagcttgttaactccgaactcccgcctattattactgttggtagctcctttcaccgacagcggtagcatcgaccgtaattcctatttgggttacctactaaacctgtatcgcgaagccatagggcaaagtcaggtggacgagcagacctatcaagaaattacccaagtcagtcgcgctttgggacaggaagacactggcagtttggaagccactctgaacttcttgcttaccaatcggtctcaaaagatccctcctcaatatgctcttactgcggaggaggagaggatccttagatatgtgcagcagagcgtgggattgtttctgatgcaagagggggcaactccgactgcagcactggacatgacagcgcgaaatatggagcccagcatgtatgccagtaaccgacctttcattaacaaactgctggactacttgcacagagctgccgctatgaactctgattatttcaccaatgccatcttaaacccgcactggctgcccccacctggtttctacacgggcgaatatgacatgcccgaccctaatgacggatttctgtgggacgacgtggacagcgatgttttttcacctctttctgatcatcgcacgtggaaaaaggaaggcggcgatagaatgcattcttctgcatcgctgtccggggtcatgggtgctaccgcggctgagcccgagtctgcaagtccttttcctagtctacccttttctctacacagtgtacgtagcagcgaagtgggtagaataagtcgcccgagtttaatgggcgaagaggagtatctaaacgattccttgctcagaccggcaagagaaaaaaatttcccaaacaatggaatagaaagtttggtggataaaatgagtagatggaagacttatgctcaggatcacagagacgagcctgggatcatggggattacaagtagagcgagccgtagacgccagcgccatgacagacagaggggtcttgtgtgggacgatgaggattcggccgatgatagcagcgtgctggacttgggtgggagaggaaggggcaacccgtttgctcatttgcgccctcgcttgggtggtatgttgtaaaaaaaaataaaaaaaaaactcaccaaggccatggcgacgagcgtacgttcgttcttctttattatctgtgtctagtataatgaggcgagtcgtgctaggcggagcggtggtgtatccggagggtcctcctccttcgtacgagagcgtgatgcagcagcagcaggcgacggcggtgatgcaatccccactggaggctccctttgtgcctccgcgatacctggcacctacggagggcagaaacagcattcgttattcggaactggcacctcagtacgataccaccaggttgtatctggtggacaacaagtcggcggacattgcttctctgaactatcagaatgaccacagcaacttcttgaccacggtggtgcaaaacaatgactttacccctacggaagccagcacccagaccattaactttgatgaacgatcgcggtggggcggtcagctaaagaccatcatgcatactaacatgccaaacgtgaacgagtatatgtttagtaacaagttcaaagcgcgtgtgatggtgtccagaaaacctcccgacggtgctgcagttggggatacttatgatcacaagcaggatattttgaaatatgagtggttcgagtttactttgccagaaggcaacttttcagttactatgactattgatttgatgaacaatgccatcatagataattacttgaaagtgggtagacagaatggagtgcttgaaagtgacattggtgttaagttcgacaccaggaacttcaagctgggatgggatcccgaaaccaagttgatcatgcctggagtgtatacgtatgaagccttccatcctgacattgtcttactgcctggctgcggagtggattttaccgagagtcgtttgagcaaccttcttggtatcagaaaaaaacagccatttcaagagggttttaagattttgtatgaagatttagaaggtggtaatattccggccctcttggatgtagatgcctatgagaacagtaagaaagaacaaaaagccaaaatagaagctgctacagctgctgcagaagctaaggcaaacatagttgccagcgactctacaagggttgctaacgctggagaggtcagaggagacaattttgcgccaacacctgttccgactgcagaatcattattggccgatgtgtctgaaggaacggacgtgaaactcactattcaacctgtagaaaaagatagtaagaatagaagctataatgtgttggaagacaaaatcaacacagcctatcgcagttggtatctttcgtacaattatggcgatcccgaaaaaggagtgcgttcctggacattgctcaccacctcagatgtcacctgcggagcagagcaggtctactggtcgcttccagacatgatgaaggatcctgtcactttccgctccactagacaagtcagtaactaccctgtggtgggtgcagagcttatgcccgtcttctcaaagagcttctacaacgaacaagctgtgtactcccagcagctccgccagtccacctcgcttacgcacgtcttcaaccgctttcctgagaaccagattttaatccgtccgccggcgcccaccattaccaccgtcagtgaaaacgttcctgctctcacagatcacgggaccctgccgttgcgcagcagtatccggggagtccaacgtgtgaccgttactgacgccagacgccgcacctgtccctacgtgtacaaggcactgggcatagtcgcaccgcgcgtcctttcaagccgcactttctaaaaaaaaaaaaaatgtccattcttatctcgcccagtaataacaccggttggggtctgcgcgctccaagcaagatgtacggaggcgcacgcaaacgttctacccaacatcctgtccgtgttcgcggacattttcgcgctccatggggcgccctcaagggccgcactcgcgttcgaaccaccgtcgatgatgtaatcgatcaggtggttgccgacgcccgtaattatactcctactgcgcctacatctactgtggatgcagttattgacagtgtagtggctgacgctcgcaactatgctcgacgtaagagccggcgaaggcgcattgccagacgccaccgagctaccactgccatgcgagccgcaagagctctgctacgaagagctagacgcgtggggcgaagagccatgcttagggcggccagacgtgcagcttcgggcgccagcgccggcaggtcccgcaggcaagcagccgctgtcgcagcggcgactattgccgacatggcccaatcgcgaagaggcaatgtatactgggtgcgtgacgctgccaccggtcaacgtgtacccgtgcgcacccgtccccctcgcacttagaagatactgagcagtctccgatgttgtgtcccagcggcgaggatgtccaagcgcaaatacaaggaagaaatgctgcaggttatcgcacctgaagtctacggccaaccgttgaaggatgaaaaaaaaccccgcaaaatcaagcgggttaaaaaggacaaaaaagaagaggaagatggcgatgatgggctggcggagtttgtgcgcgagtttgccccacggcgacgcgtgcaatggcgtgggcgcaaagttcgacatgtgttgagacctggaacttcggtggtctttacacccggcgagcgttcaagcgctacttttaagcgttcctatgatgaggtgtacggggatgatgatattcttgagcaggcggctgaccgattaggcgagtttgcttatggcaagcgtagtagaataacttccaaggatgagacagtgtcgatacccttggatcatggaaatcccacccctagtcttaaaccggtcactttgcagcaagtgttacccgtaactccgcgaacaggtgttaaacgcgaaggtgaagatttgtatcccactatgcaactgatggtacccaaacgccagaagttggaggacgttttggagaaagtaaaagtggatccagatattcaacctgaggttaaagtgagacccattaagcaggtagcgcctggtctgggggtacaaactgtagacattaagattcccactgaaagtatggaagtgcaaactgaacccgcaaagcctactgccacctccactgaagtgcaaacggatccatggatgcccatgcctattacaactgacgccgccggtcccactcgaagatcccgacgaaagtacggtccagcaagtctgttgatgcccaattatgttgtacacccatctattattcctactcctggttaccgaggcactcgctactatcgcagccgaaacagtacctcccgccgtcgccgcaagacacctgcaaatcgcagtcgtcgccgtagacgcacaagcaaaccgactcccggcgccctggtgcggcaagtgtaccgcaatggtagtgcggaacctttgacactgccgcgtgcgcgttaccatccgagtatcatcacttaatcaatgttgccgctgcctccttgcagatatggccctcacttgtcgccttcgcgttcccatcactggttaccgaggaagaaactcgcgccgtagaagagggatgttgggacgcggaatgcgacgctacaggcgacggcgtgctatccgcaagcaattgcggggtggttttttaccagccttaattccaattatcgctgctgcaattggcgcgataccaggcatagcttccgtggcggttcaggcctcgcaacgacattgacattggaaaaaaacgtataaataaaaaaaaaaaaatacaatggactctgacactcctggtcctgtgactatgttttcttagagatggaagacatcaatttttcatccttggctccgcgacacggcacgaagccgtacatgggcacctggagcgacatcggcacgagccaactgaacgggggcgccttcaattggagcagtatctggagcgggcttaaaaattttggctcaaccataaaaacatacgggaacaaagcttggaacagcagtacaggacaggcgcttagaaataaacttaaagaccagaacttccaacaaaaagtagtcgatgggatagcttccggcatcaatggagtggtagatttggctaaccaggctgtgcagaaaaagataaacagtcgtttggacccgccgccagcaaccccaggtgaaatgcaagtggaggaagaaattcctccgccagaaaaacgaggcgacaagcgtccgcgtcccgatttggaagagacgctggtgacgcgcgtagatgaaccgccttcttatgaggaagcaacgaagcttggaatgcccaccactagaccgatagccccaatggccaccggggtgatgaaaccttctcagttgcatcgacccgtcaccttggatttgccccctccccctgctgctactgctgtacccgcttctaagcctgtcgctgccccgaaaccagtcgccgtagccaggtcacgtcccgggggcgctcctcgtccaaatgcgcactggcaaaatactctgaacagcatcgtgggtctaggcgtgcaaagtgtaaaacgccgtcgctgcttttaattaaatatggagtagcgcttaacttgcctatctgtgtatatgtgtcattacacgccgtcacagcagcagaggaaaaaaggaagaggtcgtgcgtcgacgctgagttactttcaagatggccaccccatcgatgctgccccaatgggcatacatgcacatcgccggacaggatgcttcggagtacctgagtccgggtctggtgcagttcgcccgcgccacagacacctacttcaatctgggaaataagtttagaaatcccaccgtagcgccgacccacgatgtgaccaccgaccgtagccagcggctcatgttgcgcttcgtgcccgttgaccgggaggacaatacatactcttacaaagtgcggtacaccctggccgtgggcgacaacagagtgctggatatggccagcacgttctttgacattaggggtgtgttggacagaggtcccagtttcaaaccctattctggtacggcttacaactccctggctcctaaaggcgctccaaatacatctcagtggattgcagaaggtgtaaaaaatacaactggtgaggaacacgtaacagaagaggaaaccaatactactacttacacttttggcaatgctcctgtaaaagctgaagctgaaattacaaaagaaggactcccagtaggtttggaagtttcagatgaagaaagtaaaccgatttatgctgataaaacatatcagccagaacctcagctgggagatgaaacttggactgaccttgatggaaaaaccgaaaagtatggaggcagggctctcaaacccgatactaagatgaaaccatgctacgggtcctttgccaaacctactaatgtgaaaggcggtcaggcaaaacaaaaaacaacggagcagccaaatcagaaagtcgaatatgatatcgacatggagttttttgatgcggcatcgcagaaaacaaacttaagtcctaaaattgtcatgtatgcagaaaatgtaaatttggaaactccagacactcatgtagtgtacaaacctggaacagaagacacaagttccgaagctaatttgggacaacaatctatgcccaacagacccaactacattggcttcagagataactttattggacttatgtactataacagtactggtaacatgggggtgctggctggtcaagcgtctcagttaaatgcagtggttgacttgcaggacagaaacacagaactttcttaccaactcttgcttgactctctgggcgacagaaccagatactttagcatgtggaatcaggctgtggacagttatgatcctgatgtacgtgttattgaaaatcatggtgtggaagatgaacttcccaactactgttttccactggacggcataggtgttccaacaaccagttacaaatcaatagttccaaatggagacaatgcgcctaattggaaggaacctgaagtaaatggaacaagtgagatcggacagggtaatttgtttgccatggaaattaaccttcaagccaatctatggcgaagtttcctttattccaatgtggctctatatctcccagactcgtacaaatacaccccgtccaatgtcactcttccagaaaacaaaaacacctacgactacatgaacgggcgggtggtgccgccatctctagtagacacctatgtgaacattggtgccaggtggtctctggatgccatggacaatgtcaacccattcaaccaccaccgtaacgctggcttgcgttaccgatccatgcttctgggtaacggacgttatgtgcctttccacatacaagtgcctcaaaaattcttcgctgttaaaaacctgctgcttctcccaggctcctacacttatgagtggaactttaggaaggatgtgaacatggttctacagagttccctcggtaacgacctgcgggtagatggcgccagcatcagtttcacgagcatcaacctctatgctacttttttccccatggctcacaacaccgcttccacccttgaagccatgctgcggaatgacaccaatgatcagtcattcaacgactacctatctgcagctaacatgctctaccccattcctgccaatgcaaccaatattcccatttccattccttctcgcaactgggcggctttcagaggctggtcatttaccagactgaaaaccaaagaaactccctctttggggtctggatttgacccctactttgtctattctggttctattccctacctggatggtaccttctacctgaaccacacttttaagaaggtttccatcatgtttgactcttcagtgagctggcctggaaatgacaggttactatctcctaacgaatttgaaataaagcgcactgtggatggcgaaggctacaacgtagcccaatgcaacatgaccaaagactggttcttggtacagatgctcgccaactacaacatcggctatcagggcttctacattccagaaggatacaaagatcgcatgtattcatttttcagaaacttccagcccatgagcaggcaggtggttgatgaggtcaattacaaagacttcaaggccgtcgccataccctaccaacacaacaactctggctttgtgggttacatggctccgaccatgcgccaaggtcaaccctatcccgctaactatccctatccactcattggaacaactgccgtaaatagtgttacgcagaaaaagttcttgtgtgacagaaccatgtggcgcataccgttctcgagcaacttcatgtctatgggggcccttacagacttgggacagaatatgctctatgccaactcagctcatgctctggacatgacctttgaggtggatcccatggatgagcccaccctgctttatcttctcttcgaagttttcgacgtggtcagagtgcatcagccacaccgcggcatcatcgaggcagtctacctgcgtacaccgttctcggccggtaacgctaccacgtaagaagcttcttgcttcttgcaaatagcagctgcaaccatggcctgcggatcccaaaacggctccagcgagcaagagctcagagccattgtccaagacctgggttgcggaccctattttttgggaacctacgataagcgcttcccggggttcatggcccccgataagctcgcctgtgccattgtaaatacggccggacgtgagacggggggagagcactggttggctttcggttggaacccacgttctaacacctgctacctttttgatccttttggattctcggatgatcgtctcaaacagatttaccagtttgaatatgagggtctcctgcgccgcagcgctcttgctaccaaggaccgctgtattacgctggaaaaatctacccagaccgtgcagggtccccgttctgccgcctgcggacttttctgctgcatgttccttcacgcctttgtgcactggcctgaccgtcccatggacggaaaccccaccatgaaattgctaactggagtgccaaacaacatgcttcattctcctaaagtccagcccaccctgtgtgacaatcaaaaagcactctaccattttcttaatacccattcgccttattttcgctcccatcgtacacacatcgaaagggccactgcgttcgaccgtatggatgttcaataatgactcatgtaaacaacgtgttcaataaacatcactttatttttttacatgtatcaaggctctgcattacttatttatttacaagtcgaatgggttctgacgagaatcagaatgacccgcaggcagtgatacgttgcggaactgatacttgggttgccacttgaattcgggaatcaccaacttgggaaccggtatatcgggcaggatgtcactccacagctttctggtcagctgcaaagctccaagcaggtcaggagccgaaatcttgaaatcacaattaggaccagtgctttgagcgcgagagttgcggtacaccggattgcagcactgaaacaccatcagcgacggatgtctcacgcttgccagcacggtgggatctgcaatcatgcccacatccagatcttcagcattggcaatgctgaacggggtcatcttgcaggtctgcctacccatggcgggcacccaattaggcttgtggttgcaatcgcagtgcagggggatcagtatcatcttggcctgatcctgtctgattcctggatacacggctctcatgaaagcatcatattgcttgaaagcctgctgggctttactaccctcggtataaaacatcccgcaggacctgctcgaaaactggttagctgcacagccggcatcattcacacagcagcgggcgtcattgttagctatttgcaccacacttctgccccagcggttttgggtgattttggttcgctcgggattctcctttaaggctcgttgtccgttctcgctggccacatccatctcgataatctgctccttctgaatcataatattgccatgcaggcacttcagcttgccctcataatcattgcagccatgaggccacaacgcacagcctgtacattcccaattatggtgggcgatctgagaaaaagaatgtatcattccctgcagaaatcttcccatcatcgtgctcagtgtcttgtgactagtgaaagttaactggatgcctcggtgctcctcgtttacgtactggtgacagatgcgcttgtattgttcgtgttgctcaggcattagtttaaaagaggttctaagttcgttatccagcctgtacttctccatcagcagacacatcacttccatgcctttctcccaagcagacaccaggggcaagctaatcggattcttaacagtgcaggcagcagctcctttagccagagggtcatctttagcgatcttctcaatgcttcttttgccatccttctcaacgatgcgcacgggcgggtagctgaaacccactgctacaagttgcgcctcttctctttcttcttcgctgtcttgactgatgtcttgcatggggatatgtttggtcttccttggcttctttttggggggtatcggaggaggaggactgtcgctccgttccggagacagggaggattgtgacgtttcgctcaccattaccaactgactgtcggtagaagaacctgaccccacacggcgacaggtgtttctcttcgggggcagaggtggaggcgattgcgaagggctgcggtccgacctggaaggcggatgactggcagaaccccttccgcgttcgggggtgtgctccctgtggcggtcgcttaactgatttccttcgcggctggccattgtgttctcctaggcagagaaacaacagacatggaaactcagccattgctgtcaacatcgccacgagtgccatcacatctcgtcctcagcgacgaggaaaaggagcagagcttaagcattccaccgcccagtcctgccaccacctctaccctagaagataaggaggtcgacgcatctcatgacatgcagaataaaaaagcgaaagagtctgagacagacatcgagcaagacccgggctatgtgacaccggtggaacacgaggaagagttgaaacgctttctagagagagaggatgaaaactgcccaaaacaacgagcagataactatcaccaagatgctggaaatagggatcagaacaccgactacctcatagggcttgacggggaagacgcgctccttaaacatctagcaagacagtcgctcatagtcaaggatgcattattggacagaactgaagtgcccatcagtgtggaagagctcagccgcgcctacgagcttaacctcttttcacctcgtactccccccaaacgtcagccaaacggcacctgcgagccaaatcctcgcttaaacttttatccagcttttgctgtgccagaagtactggctacctatcacatcttttttaaaaatcaaaaaattccagtctcctgccgcgctaatcgcacccgcgccgatgccctactcaatctgggacctggttcacgcttacctgatatagcttccttggaagaggttccaaagatcttcgagggtctgggcaataatgagactcgggccgcaaatgctctgcaaaagggagaaaatggcatggatgagcatcacagcgttctggtggaattggaaggcgataatgccagactcgcagtactcaagcgaagcatcgaggtcacacacttcgcatatcccgctgtcaacctgccccctaaagtcatgacggcggtcatggaccagttactcattaagcgcgcaagtcccctttcagaagacatgcatgacccagatgcctgtgatgagggtaaaccagtggtcagtgatgagcagctaacccgatggctgggcaccgactctcccagggatttggaagagcgtcgcaagcttatgatggccgtggtgctggttaccgtagaactagagtgtctccgacgtttctttaccgattcagaaaccttgcgcaaactcgaagagaatctgcactacacttttagacacggctttgtgcggcaggcatgcaagatatctaacgtggaactcaccaacctggtttcctacatgggtattctgcatgagaatcgcctaggacaaagcgtgctgcacagcaccctgaagggggaagcccgccgtgattacatccgcgattgtgtctatctgtacctgtgccacacgtggcaaaccggcatgggtgtatggcagcaatgtttagaagaacagaacttgaaagagcttgacaagctcttacagaaatctcttaaggttctgtggacagggttcgacgagcgcaccgtcgcttccgacctggcagacctcatcttcccagagcgtctcagggttactttgcgaaacggattgcctgactttatgagccagagcatgcttaacaattttcgctctttcatcctggaacgctccggtatcctgcccgccacctgctgcgcactgccctccgactttgtgcctctcacctaccgcgagtgccccccgccgctatggagtcactgctacctgttccgtctggccaactatctctcctaccactcggatgtgatcgaggatgtgagcggagacggcttgctggagtgtcactgccgctgcaatctgtgcacgccccaccggtccctagcttgcaacccccagttgatgagcgaaacccagataataggcacctttgaattgcaaggccccagcagccaaggcgatgggtcttctcctgggcaaagtttaaaactgaccccgggactgtggacctccgcctacttgcgcaagtttgctccggaagattaccacccctatgaaatcaagttctatgaggaccaatcacagcctccaaaggccgaactttcggcctgcgtcatcacccagggggcaattctggcccaattgcaagccatccaaaaatcccgccaagaatttctactgaaaaagggtaagggggtctaccttgacccccagaccggcgaggaactcaacacaaggttccctcaggatgtcccaacgacgagaaaacaagaagttgaaggtgcagccgccgcccccagaagatatggaggaagattgggacagtcaggcagaggaggcggaggaggacagtctggaggacagtctggaggaagacagtttggaggaggaaaacgaggaggcagaggaggtggaagaagtaaccgccgacaaacagttatcctcggctgcggagacaagcaacagcgctaccatctccgctccgagtcgaggaacccggcggcgtcccagcagtagatgggacgagaccggacgcttcccgaacccaaccagcgcttccaagaccggtaagaaggatcggcagggatacaagtcctggcgggggcataagaatgccatcatctcctgcttgcatgagtgcgggggcaacatatccttcacgcggcgctacttgctattccaccatggggtgaactttccgcgcaatgttttgcattactaccgtcacctccacagcccctactatagccagcaaatcccggcagtctcgacagataaagacagcggcggcgacctccaacagaaaaccagcagcggcagttagaaaatacacaacaagtgcagcaacaggaggattaaagattacagccaacgagccagcgcaaacccgagagttaagaaatcggatctttccaaccctgtatgccatcttccagcagagtcggggtcaagagcaggaactgaaaataaaaaaccgatctctgcgttcgctcaccagaagttgtttgtatcacaagagcgaagatcaacttcagcgcactctcgaggacgccgaggctctcttcaacaagtactgcgcgctgactcttaaagagtaggcagcgaccgcgcttattcaaaaaaggcgggaattacatcatcctcgacatgagtaaagaaattcccacgccttacatgtggagttatcaaccccaaatgggattggcggcaggcgcctcccaggactactccacccgcatgaattggctcagcgccgggccttctatgatttctcgagttaatgatatacgcgcctaccgaaaccaaatacttttggaacagtcagctcttaccaccacgccccgccaacaccttaatcccagaaattggcccgccgccctagtgtaccaggaaagtcccgctcccaccactgtattacttcctcgagacgcccaggccgaagtccaaatgactaatgcaggtgcgcagttagctggcggctccaccctatgtcgtcacaggcctcggcataatataaaacgcctgatgatcagaggccgaggtatccagctcaacgacgagtcggtgagctctccgcttggtctacgaccagacggaatctttcagattgccggctgcgggagatcttccttcacccctcgtcaggctgttctgactttggaaagttcgtcttcgcaaccccgctcgggcggaatcgggaccgttcaatttgtggaggagtttactccctctgtctacttcaaccccttctccggatctcctgggcattacccggacgagttcataccgaacttcgacgcgattagcgagtcagtggacggctacgattgatgtctggtgacgcggctgagctatctcggctgcgacatctagaccactgccgccgctttcgctgctttgcccgggaactcattgagttcatctacttcgaactccccaaggatcaccctcaaggtccggcccacggagtgcggatttctatcgaaggcaaaatagactctcgcctgcaacgaattttctcccagcggcccgtgctgatcgagcgagaccagggaaacaccacggtttccatctactgcatttgtaatcaccccggattgcatgaaagcctttgctgtcttatgtgtactgagtttaataaaaactgaattaagactctcctacggactgccgcttcttcaacccggattttacaaccagaagaacgaaacttttcctgtcgtccaggactctgttaacttcacctttcctactcacaaactagaagctcaacgactacaccgcttttccagaagcattttccctactaatactactttcaaaaccggaggtgagctccaaggtcttcctacagaaaacccttgggtggaagcgggccttgtagtgctaggaattcttgcgggtgggcttgtgattattctttgctacctatacacaccttgcttcactttcttagtggtgttgtggtattggtttaaaaaatggggcccatactagtcttgcttgttttactttcgcttttggaaccgggttctgccaattacgatccatgtctagacttcgacccagaaaactgcacacttacttttgcacccgacacaagccgcatctgtggagttcatcgcctctcttacgaacttggcccccaacgacaaaaatttacctgcatggtgggaatcaaccccatagttatcacccagcaaagtggagatactaagggttgcattcactgctcctgcgattccatcgagtgcacctacaccctgctgaagaccctatgcggcctaagagacctgctaccaatgaattaaaaaatgattaataaaaaatcacttacttgaaatcagcaataaggtctctgttgaaattttctcccagcagcacctcacttccctcttcccaactctggtattctaaaccccgttcagcggcatactttctccatactttaaaggggatgtcaaattttagctcctctcctgtacccacaatcttcatgtctttcttcccagatgaccaagagagtccggctcagtgactccttcaaccctgtctacccctatgaagatgaaagcacctcccaacacccctttataaacccagggtttatttccccaaatggcttcacacaaagcccaaacggagttcttactttaaaatgtttaaccccactaacaaccacaggcggatctctacagctaaaagtgggagggggacttacagtggatgacaccaacggttttttgaaagaaaacataagtgccaccacaccactcgttaagactggtcactctataggtttaccactaggagccggattgggaacgaatgaaaataaactttgtatcaaattaggacaaggacttacattcaattcaaacaacatttgcattgatgacaatattaacaccttatggacaggagtcaaccccaccgaagccaactgtcaaatcatgaactccagtgaatctaatgattgcaaattaattctaacactagttaaaactggagcactagtcactgcatttgtttatgttataggagtatctaacaattttaatatgctaactacacacagaaatataaattttactgcagagctgtttttcgattctactggtaatttactaactagactctcatccctcaaaactccacttaatcataaatcaggacaaaacatggctactggtgccattactaatgctaaaggtttcatgcccagcacgactgcctatcctttcaatgataattctagagaaaaagaaaactacatttacggaacttgttactacacagctagtgatcgcactgcttttcccattgacatatctgtcatgcttaaccgaagagcaataaatgacgagacatcatattgtattcgtataacttggtcctggaacacaggagatgccccagaggtgcaaacctctgctacaaccctagtcacctccccatttaccttttactacatcagagaagacgactgacaaataaagtttgcgatcgccaggcccaccatggccttgacctttgctttactggtggccctcctggtgctcagctgcaagtcaagctgctctgtgggctgtgatctgcctcaaacccacagcctgggtagcaggaggaccttgatgctcctggcacagatgaggagaatctctcttttctcctgcttgaaggacagacatgactttggatttccccaggaggagtttggcaaccagttccaaaaggctgaaaccatccctgtcctccatgagatgatccagcagatcttcaatctcttcagcacaaaggactcatctgctgcttgggatgagaccctcctagacaaattctacactgaactctaccagcagctgaatgacctggaagcctgtgtgatacagggggtgggggtgacagagactcccctgatgaaggaggactccattctggctgtgaggaaatacttccaaagaatcactctctatctgaaagagaagaaatacagcccttgtgcctgggaggttgtcagagcagaaatcatgagatctttttctttgtcaacaaacttgcaagaaagtttaagaagtaaggaaggaagcggacagtgtactaattatgctctcttgaaattggctggagatgttgagagcaaccctggacctgctcagtcactggctctgagcctccttatcctggttctggcctttggcatccccaggacccaaggcagtgatggaggggctcaggactgttgcctcaagtacagccaaaggaagattcccgccaaggttgtccgcagctaccggaagcaggaaccaagcttaggctgctccatcccagctatcctgttcttgccccgcaagcgctctcaggcagagctatgtgcagacccaaaggagctctgggtgcagcagctgatgcagcatctggacaagacaccatccccacagaaaccagcccagggctgcaggaaggacaggggggcctccaagactggcaagaaaggaaagggctccaaaggctgcaagaggactgagcggtcacagacccctaaagggccaggaagcggagagggcagaggaagtctgctaacatgcggtgacgtcgaggagaatcctggacctgactggacctggcgcatcctgttcttggtggcagctgctacgggagctcattccaactgggtgaatgtaataagtgatttgaaaaaaattgaagatcttattcaatctatgcatattgatgctactttatatacggaaagtgatgttcaccccagttgcaaagtaacagcaatgaagtgctttctcttggagttacaagttatttcacttgagtccggagatgcaagtattcatgatacagtagaaaatctgatcatcctagcaaacaacagtttgtcttctaatgggaatgtaacagaatctggatgcaaagaatgtgaggaactggaggaaaaaaatattaaagaatttttgcagagttttgtacatattgtccaaatgttcatcaacacttctggaagcggagctactaacttcagcctgctgaagcaggctggagacgtggaggagaaccctggacctaagaaaagtggtgttcttttcctcttgggcatcatcttgctggttctgattggagtgcaaggaaccccagtagtgagaaagggtcgctgttcctgcatcagcaccaaccaagggactatccacctacaatccttgaaagaccttaaacaatttgccccaagcccttcctgcgagaaaattgaaatcattgctacactgaagaatggagttcaaacatgtctaaacccagattcagcagatgtgaaggaactgattaaaaagtgggagaaacaggtcagccaaaagaaaaagcaaaagaatgggaaaaaacatcaaaaaaagaaagttctgaaagttcgaaaatctcaacgttctcgtcaaaagaagactacaggaagcggagtgaaacagactttgaattttgaccttctcaagttggcgggagacgtggagtccaaccctggacctatgtgtcaccagcagttggtcatctcttggttttccctggtttttctggcatctcccctcgtggccatatgggaactgaagaaagatgtttatgtcgtagaattggattggtatccggatgcccctggagaaatggtggtcctcacctgtgacacccctgaagaagatggtatcacctggaccttggaccagagcagtgaggtcttaggctctggcaaaaccctgaccatccaagtcaaagagtttggagatgctggccagtacacctgtcacaaaggaggcgaggttctaagccattcgctcctgctgcttcacaaaaaggaagatggaatttggtccactgatattttaaaggaccagaaagaacccaaaaataagacctttctaagatgcgaggccaagaattattctggacgtttcacctgctggtggctgacgacaatcagtactgatttgacattcagtgtcaaaagcagcagaggctcttctgacccccaaggggtgacgtgcggagctgctacactctctgcagagagagtcagaggggacaacaaggagtatgagtactcagtggagtgccaggaggacagtgcctgcccagctgctgaggagagtctgcccattgaggtcatggtggatgccgttcacaagctcaagtatgaaaactacaccagcagcttcttcatcagggacatcatcaaacctgacccacccaagaacttgcagctgaagccattaaagaattctcggcaggtggaggtcagctgggagtaccctgacacctggagtactccacattcctacttctccctgacattctgcgttcaggtccagggcaagagcaagagagaaaagaaagatagagtcttcacggacaagacctcagccacggtcatctgccgcaaaaatgccagcattagcgtgcgggcccaggaccgctactatagctcatcttggagcgaatgggcatctgtgccctgcagtggagggggcggcagcgggggaggcggcagcggcggcgggggatcgagaaacctccccgtggccactccagacccaggaatgttcccatgccttcaccactcccaaaacctgctgagggccgtcagcaacatgctccagaaggccagacaaactctagaattttacccttgcacttctgaagagattgatcatgaagatatcacaaaagataaaaccagcacagtggaggcctgtttaccattggaattaaccaagaatgagagttgcctaaattccagagagacctctttcataactaatgggagttgcctggcctccagaaagacctcttttatgatggccctgtgccttagtagtatttatgaagacttgaagatgtaccaggtggagttcaagaccatgaatgcaaagcttctgatggatcctaagaggcagatctttctagatcaaaacatgctggcagttattgatgagctgatgcaggccctgaatttcaacagtgagactgtgccacaaaaatcctcccttgaagaaccggatttttataaaactaaaatcaagctctgcatacttcttcatgctttcagaattcgggcagtgactattgatagagtgatgagctatctgaatgcttcctaagctagcttgactgactgagatacagcgtaccttcagctcacagacatgataagatacattgatgagtttggacaaaccacaactagaatgcagtgaaaaaaatgctttatttgtgaaatttgtgatgctattgctttatttgtaaccattataagctgcaataaacaagttaacaacaacaattgcattcattttatgtttcaggttcagggggaggtgtgggaggttttttaaagcaagtaaaacctctacaaatgtggtagtcgtcagctatcctgcaggaacttgtttatttgaaaatcaattcacaaaatccgagtagttattttgcctcccccttcccatttaacagaatacaccaatctctccccacgcacagctttaaacatttggataccattagatatagacatggttttagattccacattccaaacagtttcagagcgagccaatctggggtcagtgatagataaaaatccatcgggatagtcttttaaagcgctttcacagtccaactgctgcggatgcgactccggagtctggatcacggtcatctggaagaagaacgatgggaatcataatccgaaaacggtatcggacgattgtgtctcatcaaacccacaagcagccgctgtctgcgtcgctccgtgcgactgctgtttatgggatcagggtccacagtgtcctgaagcatgattttaatagcccttaacatcaactttctggtgcgatgcgcgcagcaacgcattctgatttcactcaaatctttgcagtaggtacaacacattattacaatattgtttaataaaccataattaaaagcgctccagccaaaactcatatctgatataatcgcccctgcatgaccatcataccaaagtttaatataaattaaatgacgttccctcaaaaacacactacccacatacatgatctcttttggcatgtgcatattaacaatctgtctgtaccatggacaacgttggttaatcatgcaacccaatataaccttccggaaccacactgccaacaccgctcccccagccatgcattgaagtgaaccctgctgattacaatgacaatgaagaacccaattctctcgaccgtgaatcacttgagaatgaaaaatatctatagtggcacaacatagacataaatgcatgcatcttctcataatttttaactcctcaggatttagaaacatatcccagggaataggaagctcttgcagaacagtaaagctggcagaacaaggaagaccacgaacacaacttacactatgcatagtcatagtatcacaatctggcaacagcgggtggtcttcagtcatagaagctcgggtttcattttcctcacaacgtggtaactgggctctggtgtaagggtgatgtctggcgcatgatgtcgagcgtgcgcgcaaccttgtcataatggagttgcttcctgacattctcgtattttgtatagcaaaacgcggccctggcagaacacactcttcttcgccttctatcctgccgcttagcgtgttccgtgtgatagttcaagtacaaccacactcttaagttggtcaaaagaatgctggcttcagttgtaatcaaaactccatcgcatctaatcgttctgaggaaatcatccaagcaatgcaactggattgtgtttcaagcaggagaggagagggaagagacggaagaaccatgttaatttttattccaaacgatctcgcagtacttcaaattgtagatcgcgcagatggcatctctcgcccccactgtgttggtgaaaaagcacagctagatcaaaagaaatgcgattttcaaggtgctcaacggtggcttccagcaaagcctccacgcgcacatccaagaacaaaagaataccaaaagaaggagcattttctaactcctcaatcatcatattacattcctgcaccattcccagataattttcagctttccagccttgaattattcgtgtcagttcttgtggtaaatccaatccacacattacaaacaggtcccggagggcgccctccaccaccattcttaaacacaccctcataatgacaaaatatcttgctcctgtgtcacctgtagcgaattgagaatggcaacatcaattgacatgcccttggctctaagttcttctttaagttctagttgtaaaaactctctcatattatcaccaaactgcttagccagaagccccccgggaacaagagcaggggacgctacagtgcagtacaagcgcagacctccccaattggctccagcaaaaacaagattggaataagcatattgggaaccgccagtaatatcatcgaagttgctggaaatataatcaggcagagtttcttgtaaaaattgaataaaagaaaaatttgccaaaaaaacattcaaaacctctgggatgcaaatgcaataggttaccgcgctgcgctccaacattgttagttttgaattagtctgcaaaaataaaaaaaaaaacaagcgtcatatcatagtagcctgacgaacagatggataaatcagtctttccatcacaagacaagccacagggtctccagctcgaccctcgtaaaacctgtcatcatgattaaacaacagcaccgaaagttcctcgcggtgaccagcatgaataattcttgatgaagcatacaatccagacatgttagcatcagttaacgagaaaaaacagccaacatagcctttgggtataattatgcttaatcgtaagtatagcaaagccacccctcgcggatacaaagtaaaaggcacaggagaataaaaaatataattatttctctgctgctgttcaggcaacgtcgcccccggtccctctaaatacacatacaaagcctcatcagccatggcttaccagacaaagtacagcgggcacacaaagcacaagctctaaagtgactctccaacctctccacaatatatatatacacaagccctaaactgacgtaatgggagtaaagtgtaaaaaatcccgccaaacccaacacacaccccgaaactgcgtcaccagggaaaagtacagtttcacttccgcaatcccaacaggcgtaacttcctctttctcacggtacgtgatatcccactaacttgcaacgtcattttcccacggtcgcaccgccccttttagccgttaaccccacagccaatcaccacacgatccacactttttaaaatcacctcatttacatattggcaccattccatctataaggtatattatatagataga

SEQ ID NO: 104 - DNA, 36253 bp, Artificial Sequence
  Genome sequence of NG-761 virus
tctatctatataatataccttatagatggaatggtgccaatatgtaaatgaggtgattttaaaaagtgtggatcgtgtggtgattggctgtggggttaacggctaaaaggggcggtgcgaccgtgggaaaatgacgttttgtgggggtggagtttttttgcaagttgtcgcgggaaatgtgacgcataaaaaggcttttttctcacggaactacttagttttcccacggtatttaacaggaaatgaggtagttttgaccggatgcaagtgaaaattgttgattttcgcgcgaaaactgaatgaggaagtgtttttctgaataatgtggtatttatggcagggtggagtatttgttcagggccaggtagactttgacccattacgtggaggtttcgattaccgtgttttttacctgaatttccgcgtaccgtgtcaaagtcttctgtttttacgtaggtgtcagctgatcgctagggtatttatacctcagggtttgtgtcaagaggccactcttgagtgccagcgagaagagttttctcctctgcgccggcagtttaataataaaaaaatgagagatttgcgatttctgcctcaggaaataatctctgctgagactggaaatgaaatattggagcttgtggtgcacgccctgatgggagacgatccggagccacctgtgcagctttttgagcctcctacgcttcaggaactgtatgatttagaggtagagggatcggaggattctaatgaggaagctgtaaatggcttttttaccgattctatgcttttagctgctaatgaagggttagaattagatccgcctttggacacttttgatactccaggggtaattgtggaaagcggtacaggtgtaagaaaattacctgatttgagttccgtggactgtgatttgcactgctatgaagacgggtttcctccgagtgatgaggaggaccatgaaaaggagcagtccatgcagactgcagcgggtgagggagtgaaggctgccaatgttggttttcagttggattgcccggagcttcctggacatggctgtaagtcttgtgaatttcacaggaaaaatactggagtaaaggaactgttatgttcgctttgttatatgagaacgcactgccactttatttacagtaagtgtgtttaagttaaaatttaaaggaatatgctgtttttcacatgtatattgagtgtgagttttgtgcttcttattataggtcctgtgtctgatgctgatgaatcaccatctcctgattctactacctcacctcctgagattcaagcacctgttcctgtggacgtgcgcaagcccattcctgtgaagcttaagcctgggaaacgtccagcagtggaaaaacttgaggacttgttacagggtggggacggacctttggacttgagtacacggaaacgtccaagacaataagtgttccatatccgtgtttacttaaggtgacgtcaatatttgtgtgacagtgcaatgtaataaaaatatgttaactgttcactggtttttattgctttttgggcggggactcaggtatataagtagaagcagacctgtgtggttagctcataggagctggctttcatccatggaggtttgggccattttggaagaccttaggaagactaggcaactgttagagaacgcttcggacggagtctccggtttttggagattctggttcgctagtgaattagctagggtagtttttaggataaaacaggactataaacaagaatttgaaaagttgttggtagattgcccaggactttttgaagctcttaatttgggccatcaggttcactttaaagaaaaagttttatcagttttagacttttcaaccccaggtagaactgctgctgctgtggcttttcttacttttatattagataaatggatcccgcagactcatttcagcaggggatacgttttggatttcatagccacagcattgtggagaacatggaaggttcgcaagatgaggacaatcttaggttactggccagtgcagcctttgggtgtagcgggaatcctgaggcatccaccggtcatgccagcggttctggaggaggaacagcaagaggacaacccgagagccggcctggaccctccagtggaggaggcggagtagctgacttgtctcctgaactgcaacgggtgcttactggatctacgtccactggacgggataggggcgttaagagggagagggcatctagtggtactgatgctagatctgagttggctttaagtttaatgagtcgcagacgtcctgaaaccatttggtggcatgaggttcagaaagagggaagggatgaagtttctgtattgcaggagaaatattcactggaacaggtgaaaacatgttggttggagcctgaggatgattgggaggtggccattaaaaattatgccaagatagctttgaggcctgataaacagtataagattactagacggattaatatccggaatgcttgttacatatctggaaatggggctgaggtggtaatagatactcaagacaaggcagttattagatgctgcatgatggatatgtggcctggggtagtcggtatggaagcagtaacttttgtaaatgttaagtttaggggagatggttataatggaatagtgtttatggccaataccaaacttatattgcatggttgtagcttttttggtttcaacaatacctgtgtagatgcctggggacaggttagtgtacggggatgtagtttctatgcgtgttggattgccacagctggcagaaccaagagtcaattgtctctgaagaaatgcatatttcaaagatgtaacctgggcattctgaatgaaggcgaagcaagggtccgccactgcgcttctacagatactggatgttttattttgattaagggaaatgccagcgtaaagcataacatgatttgcggtgcttccgatgagaggccttatcaaatgctcacttgtgctggtgggcattgtaatatgctggctactgtgcatattgtttcccatcaacgcaaaaaatggcctgtttttgatcacaatgtgatgacgaagtgtaccatgcatgcaggtgggcgtagaggaatgtttatgccttaccagtgtaacatgaatcatgtgaaagtgttgttggaaccagatgccttttccagaatgagcctaacaggaatttttgacatgaacatgcaaatctggaagatcctgaggtatgatgatacgagatcgagggtacgcgcatgcgaatgcggaggcaagcatgccaggttccagccggtgtgtgtagatgtgactgaagatctcagaccggatcatttggttattgcccgcactggagcagagttcggatccagtggagaagaaactgactaaggtgagtattgggaaaactttggggtgggattttcagatggacagattgagtaaaaatttgttttttctgtcttgcagctgtcatgagtggaaacgcttcttttaaggggggagtcttcagcccttatctgacagggcgtctcccatcctgggcaggagttcgtcagaatgttatgggatctactgtggatggaagacccgtccaacccgccaattcttcaacgctgacctatgctactttaagttcttcacctttggacgcagctgcagctgccgccgccgcttctgttgccgctaacactgtgcttggaatgggttactatggaagcatcatggctaattccacttcctctaataacccttctaccctgactcaggacaagttacttgtccttttggcccagctggaggctttgacccaacgtctgggtgaactttctcagcaggtggtcgagttgcgagtacaaactgagtctgctgtcggcacggcaaagtctaaataaaaaaatcccagaatcaatgaataaataaacaagcttgttgttgatttaaaatcaagtgtttttatttcatttttcgcgcacggtatgccctagaccaccgatctctatcattgagaactcggtggattttttccaggatcctatagaggtgggattgaatgtttagatacatgggcattaggccgtctttggggtggagatagctccattgaagggattcatgctccggggtagtgttgtaaatcacccagtcataacaaggtcgcagtgcatggtgttgcacaatatcttttagaagtaggctgattgccacagataagcccttggtgtaggtgtttacaaaccggttgagctgggatgggtgcattcggggtgaaattatgtgcattttggattggatttttaagttggcaatattgccgccaagatcccgtcttgggttcatgttatgaaggaccaccaagacggtgtatccggtacatttaggaaatttatcgtgcagcttggatggaaaagcgtggaaaaatttggagacacccttgtgtcctccaagattttccatgcactcatccatgataatagcaatggggccgtgggcagcggcgcgggcaaacacgttccgtgggtctgacacatcatagttatgttcctgagttaaatcatcataagccattttaatgaatttggggcggagagtaccagattggggtatgaatgttccttcgggccccggagcatagttcccctcacagatttgcatttcccaagctttcagttccgagggtggaatcatgtccacctggggggctatgaaaaacaccgtttctggggcgggggtgattaattgtgatgatagcaaatttctgagcaattgagatttgccacatccggtggggccataaatgattccgattacgggttgcaggtggtagtttagggaacggcaactgccgtcttctcgaagcaagggggccacctcgttcatcatttcccttacatgcatattttcccgcaccaaatccattaggaggcgctctcctcctagtgatagaagttcttgtagtgaggaaaagtttttcagcggtttcagaccgtcagccatgggcattttggagagagtttgctgcaaaagttctagtctgttccacagttcagtgatgtgttctatggcatctcgatccagcagacctcctcgtttcgcgggtttggacggctcctggaatagggtatgagacgatgggcgtccagcgctgccagggttcggtccttccagggtctcagtgttcgagtcagggttgtttccgtcacagtgaaggggtgtgcgcctgcttgggcgcttgccagggtgcgcttcagactcatcctgctggtcgaaaacttctgtcgcttggcgccctgtatgtcggccaagtagcagtttaccatgagttcgtagttgagcgcctcggctgcgtggcctttggcgcggagcttacctttggaagttttcttgcataccgggcagtataggcatttcagcgcatacaacttgggcgcaaggaaaacggattctggggagtatgcatctgcgccgcaggaggcgcaaacagtttcacattccaccagccaggttaaatccggttcattggggtcaaaaacaagttttccgccatattttttgatgcgtttcttacctttggtctccatgagttcgtgtcctcgttgagtgacaaacaggctgtccgtgtccccgtagactgattttacaggcctcttctccagtggagtgcctcggtcttcttcgtacaggaactctgaccactctgatacaaaggcgcgcgtccaggccagcacaaaggaggctatgtgggaggggtagcgatcgttgtcaaccagggggtccaccttttccaaagtatgcaaacacatgtcaccctcttcaacatccaggaatgtgattggcttgtaggtgtatttcacgtgacctggggtccccgctgggggggtataaaagggggcggttctttgctcttcctcactgtcttccggatcgctgtccaggaacgtcagctgttggggtaggtattccctctcgaaggcgggcatgacctctgcactcaggttgtcagtttctaagaacgaggaggatttgatattgacagtgccggttgagatgcctttcatgaggttttcgtccatctggtcagaaaacacaatttttttattgtcaagtttggtggcaaatgatccatacagggcgttggataaaagtttggcaatggatcgcatggtttggttcttttccttgtccgcgcgctctttggcggcgatgttgagttggacatactcgcgtgccaggcacttccattcggggaagatagttgttaattcatctggcacgattctcacttgccaccctcgattatgcaaggtaattaaatccacactggtggccacctcgcctcgaaggggttcattggtccaacagagcctacctcctttcctagaacagaaagggggaagtgggtctagcataagttcatcgggagggtctgcatccatggtaaagattcccggaagtaaatccttatcaaaatagctgatgggagtggggtcatctaaggccatttgccattctcgagctgccagtgcgcgctcatatgggttaaggggactgccccatggcatgggatgggtgagtgcagaggcatacatgccacagatgtcatagacgtagatgggatcctcaaagatgcctatgtaggttggatagcatcgcccccctctgatacttgctcgcacatagtcatatagttcatgtgatggcgctagcagccccggacccaagttggtgcgattgggtttttctgttctgtagacgatctggcgaaagatggcgtgagaattggaagagatggtgggtctttgaaaaatgttgaaatgggcatgaggtagacctacagagtctctgacaaagtgggcataagattcttgaagcttggttaccagttcggcggtgacaagtacgtctagggcgcagtagtcaagtgtttcttgaatgatgtcataacctggttggtttttcttttcccacagttcgcggttgagaaggtattcttcgcgatccttccagtactcttctagcggaaacccgtctttgtctgcacggtaagatcctagcatgtagaactgattaactgccttgtaagggcagcagcccttctctacgggtagagagtatgcttgagcagcttttcgtagcgaagcgtgagtaagggcaaaggtgtctctgaccatgactttgaggaattggtatttgaagtcgatgtcgtcacaggctccctgttcccagagttggaagtctacccgtttcttgtaggcggggttgggcaaagcgaaagtaacatcattgaagagaatcttgccggccctgggcatgaaattgcgagtgatgcgaaaaggctgtggtacttccgctcggttattgataacctgggcagctaggacgatctcgtcgaaaccgttgatgttgtgtcctacgatgtataattctatgaaacgcggcgtgcctctgacgtgaggtagcttactgagctcatcaaaggttaggtctgtggggtcagataaggcgtagtgttcgagagcccattcgtgcaggtgaggattcgctttaaggaaggaggaccagaggtccactgccagtgctgtttgtaactggtcccggtactgacgaaaatgccgtccgactgccattttttctggggtgacgcaatagaaggtttgggggtcctgccgccagcgatcccacttgagttttatggcgaggtcataggcgatgttgacgagccgctggtctccagagagtttcatgaccagcatgaaggggattagctgcttgccaaaggaccccatccaggtgtaggtttccacatcgtaggtgagaaagagcctttctgtgcgaggatgagagccaatcgggaagaactggatctcctgccaccagttggaggaatggctgttgatgtgatggaagtagaactccctgcgacgcgccgagcattcatgcttgtgcttgtacagacggccgcagtagtcgcagcgttgcacgggttgtatctcgtgaatgagttgtacctggcttcccttgacgagaaatttcagtgggaagccgaggcctggcgattgtatctcgtgctttactatgttgtctgcatcggcctgttcatcttctgtctcgatggtggtcatgctgacgagccctcgcgggaggcaagtccagacctcggcgcggcaggggcggagctcgaggacgagagcgcgcaggctggagctgtccagggtcctgagacgctgcggactcaggttagtaggcagtgtcaggagattaacttgcatgatcttttggagggcgtgcgggaggttcagatagtacttgatctcaacgggtccgttggtggagatgtcgatggcttgcagggttccgtgtcccttgggcgctaccaccgtgcccttgtttttcattttggacggcggtggctctgttgcttcttgcatgtttagaagcggtgtcgagggcgcgcaccgggcggcaggggcggctcgggacccggcggcatggctggcagtggtacgtcggcgccgcgcgcgggtaggttctggtactgcgccctgagaagactcgcatgcgcgacgacgcggcggttgacatcctggatctgacgcctctgggtgaaagctaccggccccgtgagcttgaacctgaaagagagttcaacagaatcaatctcggtatcgttgacggcggcttgcctaaggatttcttgcacgtcaccagagttgtcctggtaggcgatctccgccatgaactgctcgatctcttcctcttgaagatctccgcggcccgctctctcgacggtggccgcgaggtcgttggagatgcgcccaatgagttgagagaatgcattcatgcccgcctcgttccagacgcggctgtagaccacggcccccacgggatctctcgcgcgcatgaccacctgggcgaggttgagctccacgtggcgggtgaagaccgcatagttgcataggcgctggaaaaggtagttgagtgtggtggcgatgtgctcggtgacgaagaaatacatgatccatcgtctcagcggcatctcgctgacatcgcccagagcttccaagcgctccatggcctcgtagaagtccacggcaaaattaaaaaactgggagtttcgcgcggacacggtcaactcctcttccagaagacggataagttcggcgatggtggtgcgcacctcgcgctcgaaagcccctgggatttcttcctcaatctcttcttcttccactaacatctcttcctcttcaggtggggctgcaggaggagggggaacgcggcgacgccggcggcgcacgggcagacggtcgatgaatctttcaatgacctctccgcggcggcggcgcatggtttcagtgacggcgcggccgttctcgcgcggtcgcagagtaaaaacaccgccgcgcatctccttaaagtggtgactgggaggttctccgtttgggagggagagggcgctgattatacattttattaattggcccgtagggactgcacgcagagatctgatcgtgtcaagatccacgggatctgaaaacctttcgacgaaagcgtctaaccagtcacagtcacaaggtaggctgagtacggcttcttgtgggcgggggtggttatgtgttcggtctgggtcttctgtttcttcttcatctcgggaaggtgagacgatgctgctggtgatgaaattaaagtaggcagttctaagacggcggatggtggcgaggagcaccaggtctttgggtccggcttgctggatacgcaggcgattggccattccccaagcattatcctgacatctagcaagatctttgtagtagtcttgcatgagccgttctacgggcacttcttcctcacccgttctgccatgcatacgtgtgagtccaaatccgcgcattggttgtaccagtgccaagtcagctacgactctttcggcgaggatggcttgctgtacttgggtaagggtggcttgaaagtcatcaaaatccacaaagcggtggtaagctcctgtattaatggtgtaagcacagttggccatgactgaccagttaactgtctggtgaccagggcgcacgagctcggtgtatttaaggcgcgaataggcgcgggtgtcaaagatgtaatcgttgcaggtgcgcaccagatactggtaccctataagaaaatgcggcggtggttggcggtagagaggccatcgttctgtagctggagcgccaggggcgaggtcttccaacataaggcggtgatagccgtagatgtacctggacatccaggtgattcctgcggcggtagtagaagcccgaggaaactcgcgtacgcggttccaaatgttgcgtagcggcatgaagtagttcattgtaggcacggtttgaccagtgaggcgcgcgcagtcattgatgctctatagacacggagaaaatgaaagcgttcagcgactcgactccgtagcctggaggaacgtgaacgggttgggtcgcggtgtaccccggttcgagacttgtactcgagccggccggagccgcggctaacgtggtattggcactcccgtctcgacccagcctacaaaaatccaggatacggaatcgagtcgttttgctggtttccgaatggcagggaagtgagtcctattttttttttttgccgctcagatgcatcccgtgctgcgacagatgcgcccccaacaacagcccccctcgcagcagcagcagcagcaatcacaaaaggctgtccctgcaactactgcaactgccgccgtgagcggtgcgggacagcccgcctatgatctggacttggaagagggcgaaggactggcacgtctaggtgcgccttcacccgagcggcatccgcgagttcaactgaaaaaagattctcgcgaggcgtatgtgccccaacagaacctatttagagacagaagcggcgaggagccggaggagatgcgagcttcccgctttaacgcgggtcgtgagctgcgtcacggtttggaccgaagacgagtgttgcgggacgaggatttcgaagttgatgaaatgacagggatcagtcctgccagggcacacgtggctgcagccaaccttgtatcggcttacgagcagacagtaaaggaagagcgtaacttccaaaagtcttttaataatcatgtgcgaaccctgattgcccgcgaagaagttacccttggtttgatgcatttgtgggatttgatggaagctatcattcagaaccctactagcaaacctctgaccgcccagctgtttctggtggtgcaacacagcagagacaatgaggctttcagagaggcgctgctgaacatcaccgaacccgaggggagatggttgtatgatcttatcaacattctacagagtatcatagtgcaggagcggagcctgggcctggccgagaaggtggctgccatcaattactcggttttgagcttgggaaaatattacgctcgcaaaatctacaagactccatacgttcccatagacaaggaggtgaagatagatgggttctacatgcgcatgacgctcaaggtcttgaccctgagcgatgatcttggggtgtatcgcaatgacagaatgcatcgcgcggttagcgccagcaggaggcgcgagttaagcgacagggaactgatgcacagtttgcaaagagctctgactggagctggaaccgagggtgagaattacttcgacatgggagctgacttgcagtggcagcctagtcgcagggctctgagcgccgcgacggcaggatgtgagcttccttacatagaagaggcggatgaaggcgaggaggaagagggcgagtacttggaagactgatggcacaacccgtgttttttgctagatggaacagcaagcaccggatcccgcaatgcgggcggcgctgcagagccagccgtccggcattaactcctcggacgattggacccaggccatgcaacgtatcatggcgttgacgactcgcaaccccgaagcctttagacagcaaccccaggccaaccgtctatcggccatcatggaagctgtagtgccttcccgctctaatcccactcatgagaaggtcctggccatcgtgaacgcgttggtggagaacaaagctattcgtccagatgaggccggactggtatacaacgctctcttagaacgcgtggctcgctacaacagtagcaatgtgcaaaccaatttggaccgtatgataacagatgtacgcgaagccgtgtctcagcgcgaaaggttccagcgtgatgccaacctgggttcgctggtggcgttaaatgctttcttgagtactcagcctgctaatgtgccgcgtggtcaacaggattatactaactttttaagtgctttgagactgatggtatcagaagtacctcagagcgaagtgtatcagtccggtcctgattacttctttcagactagcagacagggcttgcagacggtaaatctgagccaagcttttaaaaaccttaaaggtttgtggggagtgcatgccccggtaggagaaagagcaaccgtgtctagcttgttaactccgaactcccgcctattattactgttggtagctcctttcaccgacagcggtagcatcgaccgtaattcctatttgggttacctactaaacctgtatcgcgaagccatagggcaaagtcaggtggacgagcagacctatcaagaaattacccaagtcagtcgcgctttgggacaggaagacactggcagtttggaagccactctgaacttcttgcttaccaatcggtctcaaaagatccctcctcaatatgctcttactgcggaggaggagaggatccttagatatgtgcagcagagcgtgggattgtttctgatgcaagagggggcaactccgactgcagcactggacatgacagcgcgaaatatggagcccagcatgtatgccagtaaccgacctttcattaacaaactgctggactacttgcacagagctgccgctatgaactctgattatttcaccaatgccatcttaaacccgcactggctgcccccacctggtttctacacgggcgaatatgacatgcccgaccctaatgacggatttctgtgggacgacgtggacagcgatgttttttcacctctttctgatcatcgcacgtggaaaaaggaaggcggcgatagaatgcattcttctgcatcgctgtccggggtcatgggtgctaccgcggctgagcccgagtctgcaagtccttttcctagtctacccttttctctacacagtgtacgtagcagcgaagtgggtagaataagtcgcccgagtttaatgggcgaagaggagtatctaaacgattccttgctcagaccggcaagagaaaaaaatttcccaaacaatggaatagaaagtttggtggataaaatgagtagatggaagacttatgctcaggatcacagagacgagcctgggatcatggggattacaagtagagcgagccgtagacgccagcgccatgacagacagaggggtcttgtgtgggacgatgaggattcggccgatgatagcagcgtgctggacttgggtgggagaggaaggggcaacccgtttgctcatttgcgccctcgcttgggtggtatgttgtaaaaaaaaataaaaaaaaaactcaccaaggccatggcgacgagcgtacgttcgttcttctttattatctgtgtctagtataatgaggcgagtcgtgctaggcggagcggtggtgtatccggagggtcctcctccttcgtacgagagcgtgatgcagcagcagcaggcgacggcggtgatgcaatccccactggaggctccctttgtgcctccgcgatacctggcacctacggagggcagaaacagcattcgttattcggaactggcacctcagtacgataccaccaggttgtatctggtggacaacaagtcggcggacattgcttctctgaactatcagaatgaccacagcaacttcttgaccacggtggtgcaaaacaatgactttacccctacggaagccagcacccagaccattaactttgatgaacgatcgcggtggggcggtcagctaaagaccatcatgcatactaacatgccaaacgtgaacgagtatatgtttagtaacaagttcaaagcgcgtgtgatggtgtccagaaaacctcccgacggtgctgcagttggggatacttatgatcacaagcaggatattttgaaatatgagtggttcgagtttactttgccagaaggcaacttttcagttactatgactattgatttgatgaacaatgccatcatagataattacttgaaagtgggtagacagaatggagtgcttgaaagtgacattggtgttaagttcgacaccaggaacttcaagctgggatgggatcccgaaaccaagttgatcatgcctggagtgtatacgtatgaagccttccatcctgacattgtcttactgcctggctgcggagtggattttaccgagagtcgtttgagcaaccttcttggtatcagaaaaaaacagccatttcaagagggttttaagattttgtatgaagatttagaaggtggtaatattccggccctcttggatgtagatgcctatgagaacagtaagaaagaacaaaaagccaaaatagaagctgctacagctgctgcagaagctaaggcaaacatagttgccagcgactctacaagggttgctaacgctggagaggtcagaggagacaattttgcgccaacacctgttccgactgcagaatcattattggccgatgtgtctgaaggaacggacgtgaaactcactattcaacctgtagaaaaagatagtaagaatagaagctataatgtgttggaagacaaaatcaacacagcctatcgcagttggtatctttcgtacaattatggcgatcccgaaaaaggagtgcgttcctggacattgctcaccacctcagatgtcacctgcggagcagagcaggtctactggtcgcttccagacatgatgaaggatcctgtcactttccgctccactagacaagtcagtaactaccctgtggtgggtgcagagcttatgcccgtcttctcaaagagcttctacaacgaacaagctgtgtactcccagcagctccgccagtccacctcgcttacgcacgtcttcaaccgctttcctgagaaccagattttaatccgtccgccggcgcccaccattaccaccgtcagtgaaaacgttcctgctctcacagatcacgggaccctgccgttgcgcagcagtatccggggagtccaacgtgtgaccgttactgacgccagacgccgcacctgtccctacgtgtacaaggcactgggcatagtcgcaccgcgcgtcctttcaagccgcactttctaaaaaaaaaaaaaatgtccattcttatctcgcccagtaataacaccggttggggtctgcgcgctccaagcaagatgtacggaggcgcacgcaaacgttctacccaacatcctgtccgtgttcgcggacattttcgcgctccatggggcgccctcaagggccgcactcgcgttcgaaccaccgtcgatgatgtaatcgatcaggtggttgccgacgcccgtaattatactcctactgcgcctacatctactgtggatgcagttattgacagtgtagtggctgacgctcgcaactatgctcgacgtaagagccggcgaaggcgcattgccagacgccaccgagctaccactgccatgcgagccgcaagagctctgctacgaagagctagacgcgtggggcgaagagccatgcttagggcggccagacgtgcagcttcgggcgccagcgccggcaggtcccgcaggcaagcagccgctgtcgcagcggcgactattgccgacatggcccaatcgcgaagaggcaatgtatactgggtgcgtgacgctgccaccggtcaacgtgtacccgtgcgcacccgtccccctcgcacttagaagatactgagcagtctccgatgttgtgtcccagcggcgaggatgtccaagcgcaaatacaaggaagaaatgctgcaggttatcgcacctgaagtctacggccaaccgttgaaggatgaaaaaaaaccccgcaaaatcaagcgggttaaaaaggacaaaaaagaagaggaagatggcgatgatgggctggcggagtttgtgcgcgagtttgccccacggcgacgcgtgcaatggcgtgggcgcaaagttcgacatgtgttgagacctggaacttcggtggtctttacacccggcgagcgttcaagcgctacttttaagcgttcctatgatgaggtgtacggggatgatgatattcttgagcaggcggctgaccgattaggcgagtttgcttatggcaagcgtagtagaataacttccaaggatgagacagtgtcgatacccttggatcatggaaatcccacccctagtcttaaaccggtcactttgcagcaagtgttacccgtaactccgcgaacaggtgttaaacgcgaaggtgaagatttgtatcccactatgcaactgatggtacccaaacgccagaagttggaggacgttttggagaaagtaaaagtggatccagatattcaacctgaggttaaagtgagacccattaagcaggtagcgcctggtctgggggtacaaactgtagacattaagattcccactgaaagtatggaagtgcaaactgaacccgcaaagcctactgccacctccactgaagtgcaaacggatccatggatgcccatgcctattacaactgacgccgccggtcccactcgaagatcccgacgaaagtacggtccagcaagtctgttgatgcccaattatgttgtacacccatctattattcctactcctggttaccgaggcactcgctactatcgcagccgaaacagtacctcccgccgtcgccgcaagacacctgcaaatcgcagtcgtcgccgtagacgcacaagcaaaccgactcccggcgccctggtgcggcaagtgtaccgcaatggtagtgcggaacctttgacactgccgcgtgcgcgttaccatccgagtatcatcacttaatcaatgttgccgctgcctccttgcagatatggccctcacttgtcgccttcgcgttcccatcactggttaccgaggaagaaactcgcgccgtagaagagggatgttgggacgcggaatgcgacgctacaggcgacggcgtgctatccgcaagcaattgcggggtggttttttaccagccttaattccaattatcgctgctgcaattggcgcgataccaggcatagcttccgtggcggttcaggcctcgcaacgacattgacattggaaaaaaacgtataaataaaaaaaaaaaaatacaatggactctgacactcctggtcctgtgactatgttttcttagagatggaagacatcaatttttcatccttggctccgcgacacggcacgaagccgtacatgggcacctggagcgacatcggcacgagccaactgaacgggggcgccttcaattggagcagtatctggagcgggcttaaaaattttggctcaaccataaaaacatacgggaacaaagcttggaacagcagtacaggacaggcgcttagaaataaacttaaagaccagaacttccaacaaaaagtagtcgatgggatagcttccggcatcaatggagtggtagatttggctaaccaggctgtgcagaaaaagataaacagtcgtttggacccgccgccagcaaccccaggtgaaatgcaagtggaggaagaaattcctccgccagaaaaacgaggcgacaagcgtccgcgtcccgatttggaagagacgctggtgacgcgcgtagatgaaccgccttcttatgaggaagcaacgaagcttggaatgcccaccactagaccgatagccccaatggccaccggggtgatgaaaccttctcagttgcatcgacccgtcaccttggatttgccccctccccctgctgctactgctgtacccgcttctaagcctgtcgctgccccgaaaccagtcgccgtagccaggtcacgtcccgggggcgctcctcgtccaaatgcgcactggcaaaatactctgaacagcatcgtgggtctaggcgtgcaaagtgtaaaacgccgtcgctgcttttaattaaatatggagtagcgcttaacttgcctatctgtgtatatgtgtcattacacgccgtcacagcagcagaggaaaaaaggaagaggtcgtgcgtcgacgctgagttactttcaagatggccaccccatcgatgctgccccaatgggcatacatgcacatcgccggacaggatgcttcggagtacctgagtccgggtctggtgcagttcgcccgcgccacagacacctacttcaatctgggaaataagtttagaaatcccaccgtagcgccgacccacgatgtgaccaccgaccgtagccagcggctcatgttgcgcttcgtgcccgttgaccgggaggacaatacatactcttacaaagtgcggtacaccctggccgtgggcgacaacagagtgctggatatggccagcacgttctttgacattaggggtgtgttggacagaggtcccagtttcaaaccctattctggtacggcttacaactccctggctcctaaaggcgctccaaatacatctcagtggattgcagaaggtgtaaaaaatacaactggtgaggaacacgtaacagaagaggaaaccaatactactacttacacttttggcaatgctcctgtaaaagctgaagctgaaattacaaaagaaggactcccagtaggtttggaagtttcagatgaagaaagtaaaccgatttatgctgataaaacatatcagccagaacctcagctgggagatgaaacttggactgaccttgatggaaaaaccgaaaagtatggaggcagggctctcaaacccgatactaagatgaaaccatgctacgggtcctttgccaaacctactaatgtgaaaggcggtcaggcaaaacaaaaaacaacggagcagccaaatcagaaagtcgaatatgatatcgacatggagttttttgatgcggcatcgcagaaaacaaacttaagtcctaaaattgtcatgtatgcagaaaatgtaaatttggaaactccagacactcatgtagtgtacaaacctggaacagaagacacaagttccgaagctaatttgggacaacaatctatgcccaacagacccaactacattggcttcagagataactttattggacttatgtactataacagtactggtaacatgggggtgctggctggtcaagcgtctcagttaaatgcagtggttgacttgcaggacagaaacacagaactttcttaccaactcttgcttgactctctgggcgacagaaccagatactttagcatgtggaatcaggctgtggacagttatgatcctgatgtacgtgttattgaaaatcatggtgtggaagatgaacttcccaactactgttttccactggacggcataggtgttccaacaaccagttacaaatcaatagttccaaatggagacaatgcgcctaattggaaggaacctgaagtaaatggaacaagtgagatcggacagggtaatttgtttgccatggaaattaaccttcaagccaatctatggcgaagtttcctttattccaatgtggctctatatctcccagactcgtacaaatacaccccgtccaatgtcactcttccagaaaacaaaaacacctacgactacatgaacgggcgggtggtgccgccatctctagtagacacctatgtgaacattggtgccaggtggtctctggatgccatggacaatgtcaacccattcaaccaccaccgtaacgctggcttgcgttaccgatccatgcttctgggtaacggacgttatgtgcctttccacatacaagtgcctcaaaaattcttcgctgttaaaaacctgctgcttctcccaggctcctacacttatgagtggaactttaggaaggatgtgaacatggttctacagagttccctcggtaacgacctgcgggtagatggcgccagcatcagtttcacgagcatcaacctctatgctacttttttccccatggctcacaacaccgcttccacccttgaagccatgctgcggaatgacaccaatgatcagtcattcaacgactacctatctgcagctaacatgctctaccccattcctgccaatgcaaccaatattcccatttccattccttctcgcaactgggcggctttcagaggctggtcatttaccagactgaaaaccaaagaaactccctctttggggtctggatttgacccctactttgtctattctggttctattccctacctggatggtaccttctacctgaaccacacttttaagaaggtttccatcatgtttgactcttcagtgagctggcctggaaatgacaggttactatctcctaacgaatttgaaataaagcgcactgtggatggcgaaggctacaacgtagcccaatgcaacatgaccaaagactggttcttggtacagatgctcgccaactacaacatcggctatcagggcttctacattccagaaggatacaaagatcgcatgtattcatttttcagaaacttccagcccatgagcaggcaggtggttgatgaggtcaattacaaagacttcaaggccgtcgccataccctaccaacacaacaactctggctttgtgggttacatggctccgaccatgcgccaaggtcaaccctatcccgctaactatccctatccactcattggaacaactgccgtaaatagtgttacgcagaaaaagttcttgtgtgacagaaccatgtggcgcataccgttctcgagcaacttcatgtctatgggggcccttacagacttgggacagaatatgctctatgccaactcagctcatgctctggacatgacctttgaggtggatcccatggatgagcccaccctgctttatcttctcttcgaagttttcgacgtggtcagagtgcatcagccacaccgcggcatcatcgaggcagtctacctgcgtacaccgttctcggccggtaacgctaccacgtaagaagcttcttgcttcttgcaaatagcagctgcaaccatggcctgcggatcccaaaacggctccagcgagcaagagctcagagccattgtccaagacctgggttgcggaccctattttttgggaacctacgataagcgcttcccggggttcatggcccccgataagctcgcctgtgccattgtaaatacggccggacgtgagacggggggagagcactggttggctttcggttggaacccacgttctaacacctgctacctttttgatccttttggattctcggatgatcgtctcaaacagatttaccagtttgaatatgagggtctcctgcgccgcagcgctcttgctaccaaggaccgctgtattacgctggaaaaatctacccagaccgtgcagggtccccgttctgccgcctgcggacttttctgctgcatgttccttcacgcctttgtgcactggcctgaccgtcccatggacggaaaccccaccatgaaattgctaactggagtgccaaacaacatgcttcattctcctaaagtccagcccaccctgtgtgacaatcaaaaagcactctaccattttcttaatacccattcgccttattttcgctcccatcgtacacacatcgaaagggccactgcgttcgaccgtatggatgttcaataatgactcatgtaaacaacgtgttcaataaacatcactttatttttttacatgtatcaaggctctgcattacttatttatttacaagtcgaatgggttctgacgagaatcagaatgacccgcaggcagtgatacgttgcggaactgatacttgggttgccacttgaattcgggaatcaccaacttgggaaccggtatatcgggcaggatgtcactccacagctttctggtcagctgcaaagctccaagcaggtcaggagccgaaatcttgaaatcacaattaggaccagtgctttgagcgcgagagttgcggtacaccggattgcagcactgaaacaccatcagcgacggatgtctcacgcttgccagcacggtgggatctgcaatcatgcccacatccagatcttcagcattggcaatgctgaacggggtcatcttgcaggtctgcctacccatggcgggcacccaattaggcttgtggttgcaatcgcagtgcagggggatcagtatcatcttggcctgatcctgtctgattcctggatacacggctctcatgaaagcatcatattgcttgaaagcctgctgggctttactaccctcggtataaaacatcccgcaggacctgctcgaaaactggttagctgcacagccggcatcattcacacagcagcgggcgtcattgttagctatttgcaccacacttctgccccagcggttttgggtgattttggttcgctcgggattctcctttaaggctcgttgtccgttctcgctggccacatccatctcgataatctgctccttctgaatcataatattgccatgcaggcacttcagcttgccctcataatcattgcagccatgaggccacaacgcacagcctgtacattcccaattatggtgggcgatctgagaaaaagaatgtatcattccctgcagaaatcttcccatcatcgtgctcagtgtcttgtgactagtgaaagttaactggatgcctcggtgctcctcgtttacgtactggtgacagatgcgcttgtattgttcgtgttgctcaggcattagtttaaaagaggttctaagttcgttatccagcctgtacttctccatcagcagacacatcacttccatgcctttctcccaagcagacaccaggggcaagctaatcggattcttaacagtgcaggcagcagctcctttagccagagggtcatctttagcgatcttctcaatgcttcttttgccatccttctcaacgatgcgcacgggcgggtagctgaaacccactgctacaagttgcgcctcttctctttcttcttcgctgtcttgactgatgtcttgcatggggatatgtttggtcttccttggcttctttttggggggtatcggaggaggaggactgtcgctccgttccggagacagggaggattgtgacgtttcgctcaccattaccaactgactgtcggtagaagaacctgaccccacacggcgacaggtgtttctcttcgggggcagaggtggaggcgattgcgaagggctgcggtccgacctggaaggcggatgactggcagaaccccttccgcgttcgggggtgtgctccctgtggcggtcgcttaactgatttccttcgcggctggccattgtgttctcctaggcagagaaacaacagacatggaaactcagccattgctgtcaacatcgccacgagtgccatcacatctcgtcctcagcgacgaggaaaaggagcagagcttaagcattccaccgcccagtcctgccaccacctctaccctagaagataaggaggtcgacgcatctcatgacatgcagaataaaaaagcgaaagagtctgagacagacatcgagcaagacccgggctatgtgacaccggtggaacacgaggaagagttgaaacgctttctagagagagaggatgaaaactgcccaaaacaacgagcagataactatcaccaagatgctggaaatagggatcagaacaccgactacctcatagggcttgacggggaagacgcgctccttaaacatctagcaagacagtcgctcatagtcaaggatgcattattggacagaactgaagtgcccatcagtgtggaagagctcagccgcgcctacgagcttaacctcttttcacctcgtactccccccaaacgtcagccaaacggcacctgcgagccaaatcctcgcttaaacttttatccagcttttgctgtgccagaagtactggctacctatcacatcttttttaaaaatcaaaaaattccagtctcctgccgcgctaatcgcacccgcgccgatgccctactcaatctgggacctggttcacgcttacctgatatagcttccttggaagaggttccaaagatcttcgagggtctgggcaataatgagactcgggccgcaaatgctctgcaaaagggagaaaatggcatggatgagcatcacagcgttctggtggaattggaaggcgataatgccagactcgcagtactcaagcgaagcatcgaggtcacacacttcgcatatcccgctgtcaacctgccccctaaagtcatgacggcggtcatggaccagttactcattaagcgcgcaagtcccctttcagaagacatgcatgacccagatgcctgtgatgagggtaaaccagtggtcagtgatgagcagctaacccgatggctgggcaccgactctcccagggatttggaagagcgtcgcaagcttatgatggccgtggtgctggttaccgtagaactagagtgtctccgacgtttctttaccgattcagaaaccttgcgcaaactcgaagagaatctgcactacacttttagacacggctttgtgcggcaggcatgcaagatatctaacgtggaactcaccaacctggtttcctacatgggtattctgcatgagaatcgcctaggacaaagcgtgctgcacagcaccctgaagggggaagcccgccgtgattacatccgcgattgtgtctatctgtacctgtgccacacgtggcaaaccggcatgggtgtatggcagcaatgtttagaagaacagaacttgaaagagcttgacaagctcttacagaaatctcttaaggttctgtggacagggttcgacgagcgcaccgtcgcttccgacctggcagacctcatcttcccagagcgtctcagggttactttgcgaaacggattgcctgactttatgagccagagcatgcttaacaattttcgctctttcatcctggaacgctccggtatcctgcccgccacctgctgcgcactgccctccgactttgtgcctctcacctaccgcgagtgccccccgccgctatggagtcactgctacctgttccgtctggccaactatctctcctaccactcggatgtgatcgaggatgtgagcggagacggcttgctggagtgtcactgccgctgcaatctgtgcacgccccaccggtccctagcttgcaacccccagttgatgagcgaaacccagataataggcacctttgaattgcaaggccccagcagccaaggcgatgggtcttctcctgggcaaagtttaaaactgaccccgggactgtggacctccgcctacttgcgcaagtttgctccggaagattaccacccctatgaaatcaagttctatgaggaccaatcacagcctccaaaggccgaactttcggcctgcgtcatcacccagggggcaattctggcccaattgcaagccatccaaaaatcccgccaagaatttctactgaaaaagggtaagggggtctaccttgacccccagaccggcgaggaactcaacacaaggttccctcaggatgtcccaacgacgagaaaacaagaagttgaaggtgcagccgccgcccccagaagatatggaggaagattgggacagtcaggcagaggaggcggaggaggacagtctggaggacagtctggaggaagacagtttggaggaggaaaacgaggaggcagaggaggtggaagaagtaaccgccgacaaacagttatcctcggctgcggagacaagcaacagcgctaccatctccgctccgagtcgaggaacccggcggcgtcccagcagtagatgggacgagaccggacgcttcccgaacccaaccagcgcttccaagaccggtaagaaggatcggcagggatacaagtcctggcgggggcataagaatgccatcatctcctgcttgcatgagtgcgggggcaacatatccttcacgcggcgctacttgctattccaccatggggtgaactttccgcgcaatgttttgcattactaccgtcacctccacagcccctactatagccagcaaatcccggcagtctcgacagataaagacagcggcggcgacctccaacagaaaaccagcagcggcagttagaaaatacacaacaagtgcagcaacaggaggattaaagattacagccaacgagccagcgcaaacccgagagttaagaaatcggatctttccaaccctgtatgccatcttccagcagagtcggggtcaagagcaggaactgaaaataaaaaaccgatctctgcgttcgctcaccagaagttgtttgtatcacaagagcgaagatcaacttcagcgcactctcgaggacgccgaggctctcttcaacaagtactgcgcgctgactcttaaagagtaggcagcgaccgcgcttattcaaaaaaggcgggaattacatcatcctcgacatgagtaaagaaattcccacgccttacatgtggagttatcaaccccaaatgggattggcggcaggcgcctcccaggactactccacccgcatgaattggctcagcgccgggccttctatgatttctcgagttaatgatatacgcgcctaccgaaaccaaatacttttggaacagtcagctcttaccaccacgccccgccaacaccttaatcccagaaattggcccgccgccctagtgtaccaggaaagtcccgctcccaccactgtattacttcctcgagacgcccaggccgaagtccaaatgactaatgcaggtgcgcagttagctggcggctccaccctatgtcgtcacaggcctcggcataatataaaacgcctgatgatcagaggccgaggtatccagctcaacgacgagtcggtgagctctccgcttggtctacgaccagacggaatctttcagattgccggctgcgggagatcttccttcacccctcgtcaggctgttctgactttggaaagttcgtcttcgcaaccccgctcgggcggaatcgggaccgttcaatttgtggaggagtttactccctctgtctacttcaaccccttctccggatctcctgggcattacccggacgagttcataccgaacttcgacgcgattagcgagtcagtggacggctacgattgatgtctggtgacgcggctgagctatctcggctgcgacatctagaccactgccgccgctttcgctgctttgcccgggaactcattgagttcatctacttcgaactccccaaggatcaccctcaaggtccggcccacggagtgcggatttctatcgaaggcaaaatagactctcgcctgcaacgaattttctcccagcggcccgtgctgatcgagcgagaccagggaaacaccacggtttccatctactgcatttgtaatcaccccggattgcatgaaagcctttgctgtcttatgtgtactgagtttaataaaaactgaattaagactctcctacggactgccgcttcttcaacccggattttacaaccagaagaacgaaacttttcctgtcgtccaggactctgttaacttcacctttcctactcacaaactagaagctcaacgactacaccgcttttccagaagcattttccctactaatactactttcaaaaccggaggtgagctccaaggtcttcctacagaaaacccttgggtggaagcgggccttgtagtgctaggaattcttgcgggtgggcttgtgattattctttgctacctatacacaccttgcttcactttcttagtggtgttgtggtattggtttaaaaaatggggcccatactagtcttgcttgttttactttcgcttttggaaccgggttctgccaattacgatccatgtctagacttcgacccagaaaactgcacacttacttttgcacccgacacaagccgcatctgtggagttcatcgcctctcttacgaacttggcccccaacgacaaaaatttacctgcatggtgggaatcaaccccatagttatcacccagcaaagtggagatactaagggttgcattcactgctcctgcgattccatcgagtgcacctacaccctgctgaagaccctatgcggcctaagagacctgctaccaatgaattaaaaaatgattaataaaaaatcacttacttgaaatcagcaataaggtctctgttgaaattttctcccagcagcacctcacttccctcttcccaactctggtattctaaaccccgttcagcggcatactttctccatactttaaaggggatgtcaaattttagctcctctcctgtacccacaatcttcatgtctttcttcccagatgaccaagagagtccggctcagtgactccttcaaccctgtctacccctatgaagatgaaagcacctcccaacacccctttataaacccagggtttatttccccaaatggcttcacacaaagcccaaacggagttcttactttaaaatgtttaaccccactaacaaccacaggcggatctctacagctaaaagtgggagggggacttacagtggatgacaccaacggttttttgaaagaaaacataagtgccaccacaccactcgttaagactggtcactctataggtttaccactaggagccggattgggaacgaatgaaaataaactttgtatcaaattaggacaaggacttacattcaattcaaacaacatttgcattgatgacaatattaacaccttatggacaggagtcaaccccaccgaagccaactgtcaaatcatgaactccagtgaatctaatgattgcaaattaattctaacactagttaaaactggagcactagtcactgcatttgtttatgttataggagtatctaacaattttaatatgctaactacacacagaaatataaattttactgcagagctgtttttcgattctactggtaatttactaactagactctcatccctcaaaactccacttaatcataaatcaggacaaaacatggctactggtgccattactaatgctaaaggtttcatgcccagcacgactgcctatcctttcaatgataattctagagaaaaagaaaactacatttacggaacttgttactacacagctagtgatcgcactgcttttcccattgacatatctgtcatgcttaaccgaagagcaataaatgacgagacatcatattgtattcgtataacttggtcctggaacacaggagatgccccagaggtgcaaacctctgctacaaccctagtcacctccccatttaccttttactacatcagagaagacgactgacaaataaagtttgcgatcgccaggcccaccatggactggacctggcgcatcctgttcttggtggcagctgctacgggagctcattccaactgggtgaatgtaataagtgatttgaaaaaaattgaagatcttattcaatctatgcatattgatgctactttatatacggaaagtgatgttcaccccagttgcaaagtaacagcaatgaagtgctttctcttggagttacaagttatttcacttgagtccggagatgcaagtattcatgatacagtagaaaatctgatcatcctagcaaacaacagtttgtcttctaatgggaatgtaacagaatctggatgcaaagaatgtgaggaactggaggaaaaaaatattaaagaatttttgcagagttttgtacatattgtccaaatgttcatcaacacttctggaagcggacagtgtactaattatgctctcttgaaattggctggagatgttgagagcaaccctggacctgctcagtcactggctctgagcctccttatcctggttctggcctttggcatccccaggacccaaggcagtgatggaggggctcaggactgttgcctcaagtacagccaaaggaagattcccgccaaggttgtccgcagctaccggaagcaggaaccaagcttaggctgctccatcccagctatcctgttcttgccccgcaagcgctctcaggcagagctatgtgcagacccaaaggagctctgggtgcagcagctgatgcagcatctggacaagacaccatccccacagaaaccagcccagggctgcaggaaggacaggggggcctccaagactggcaagaaaggaaagggctccaaaggctgcaagaggactgagcggtcacagacccctaaagggccaggaagcggagagggcagaggaagtctgctaacatgcggtgacgtcgaggagaatcctggacctgccttgacctttgctttactggtggccctcctggtgctcagctgcaagtcaagctgctctgtgggctgtgatctgcctcaaacccacagcctgggtagcaggaggaccttgatgctcctggcacagatgaggagaatctctcttttctcctgcttgaaggacagacatgactttggatttccccaggaggagtttggcaaccagttccaaaaggctgaaaccatccctgtcctccatgagatgatccagcagatcttcaatctcttcagcacaaaggactcatctgctgcttgggatgagaccctcctagacaaattctacactgaactctaccagcagctgaatgacctggaagcctgtgtgatacagggggtgggggtgacagagactcccctgatgaaggaggactccattctggctgtgaggaaatacttccaaagaatcactctctatctgaaagagaagaaatacagcccttgtgcctgggaggttgtcagagcagaaatcatgagatctttttctttgtcaacaaacttgcaagaaagtttaagaagtaaggaaggaagcggagctactaacttcagcctgctgaagcaggctggagacgtggaggagaaccctggacctaagaaaagtggtgttcttttcctcttgggcatcatcttgctggttctgattggagtgcaaggaaccccagtagtgagaaagggtcgctgttcctgcatcagcaccaaccaagggactatccacctacaatccttgaaagaccttaaacaatttgccccaagcccttcctgcgagaaaattgaaatcattgctacactgaagaatggagttcaaacatgtctaaacccagattcagcagatgtgaaggaactgattaaaaagtgggagaaacaggtcagccaaaagaaaaagcaaaagaatgggaaaaaacatcaaaaaaagaaagttctgaaagttcgaaaatctcaacgttctcgtcaaaagaagactacaggaagcggagtgaaacagactttgaattttgaccttctcaagttggcgggagacgtggagtccaaccctggacctatgtgtcaccagcagttggtcatctcttggttttccctggtttttctggcatctcccctcgtggccatatgggaactgaagaaagatgtttatgtcgtagaattggattggtatccggatgcccctggagaaatggtggtcctcacctgtgacacccctgaagaagatggtatcacctggaccttggaccagagcagtgaggtcttaggctctggcaaaaccctgaccatccaagtcaaagagtttggagatgctggccagtacacctgtcacaaaggaggcgaggttctaagccattcgctcctgctgcttcacaaaaaggaagatggaatttggtccactgatattttaaaggaccagaaagaacccaaaaataagacctttctaagatgcgaggccaagaattattctggacgtttcacctgctggtggctgacgacaatcagtactgatttgacattcagtgtcaaaagcagcagaggctcttctgacccccaaggggtgacgtgcggagctgctacactctctgcagagagagtcagaggggacaacaaggagtatgagtactcagtggagtgccaggaggacagtgcctgcccagctgctgaggagagtctgcccattgaggtcatggtggatgccgttcacaagctcaagtatgaaaactacaccagcagcttcttcatcagggacatcatcaaacctgacccacccaagaacttgcagctgaagccattaaagaattctcggcaggtggaggtcagctgggagtaccctgacacctggagtactccacattcctacttctccctgacattctgcgttcaggtccagggcaagagcaagagagaaaagaaagatagagtcttcacggacaagacctcagccacggtcatctgccgcaaaaatgccagcattagcgtgcgggcccaggaccgctactatagctcatcttggagcgaatgggcatctgtgccctgcagtggagggggcggcagcgggggaggcggcagcggcggcgggggatcgagaaacctccccgtggccactccagacccaggaatgttcccatgccttcaccactcccaaaacctgctgagggccgtcagcaacatgctccagaaggccagacaaactctagaattttacccttgcacttctgaagagattgatcatgaagatatcacaaaagataaaaccagcacagtggaggcctgtttaccattggaattaaccaagaatgagagttgcctaaattccagagagacctctttcataactaatgggagttgcctggcctccagaaagacctcttttatgatggccctgtgccttagtagtatttatgaagacttgaagatgtaccaggtggagttcaagaccatgaatgcaaagcttctgatggatcctaagaggcagatctttctagatcaaaacatgctggcagttattgatgagctgatgcaggccctgaatttcaacagtgagactgtgccacaaaaatcctcccttgaagaaccggatttttataaaactaaaatcaagctctgcatacttcttcatgctttcagaattcgggcagtgactattgatagagtgatgagctatctgaatgcttcctaagctagcttgactgactgagatacagcgtaccttcagctcacagacatgataagatacattgatgagtttggacaaaccacaactagaatgcagtgaaaaaaatgctttatttgtgaaatttgtgatgctattgctttatttgtaaccattataagctgcaataaacaagttaacaacaacaattgcattcattttatgtttcaggttcagggggaggtgtgggaggttttttaaagcaagtaaaacctctacaaatgtggtagtcgtcagctatcctgcaggaacttgtttatttgaaaatcaattcacaaaatccgagtagttattttgcctcccccttcccatttaacagaatacaccaatctctccccacgcacagctttaaacatttggataccattagatatagacatggttttagattccacattccaaacagtttcagagcgagccaatctggggtcagtgatagataaaaatccatcgggatagtcttttaaagcgctttcacagtccaactgctgcggatgcgactccggagtctggatcacggtcatctggaagaagaacgatgggaatcataatccgaaaacggtatcggacgattgtgtctcatcaaacccacaagcagccgctgtctgcgtcgctccgtgcgactgctgtttatgggatcagggtccacagtgtcctgaagcatgattttaatagcccttaacatcaactttctggtgcgatgcgcgcagcaacgcattctgatttcactcaaatctttgcagtaggtacaacacattattacaatattgtttaataaaccataattaaaagcgctccagccaaaactcatatctgatataatcgcccctgcatgaccatcataccaaagtttaatataaattaaatgacgttccctcaaaaacacactacccacatacatgatctcttttggcatgtgcatattaacaatctgtctgtaccatggacaacgttggttaatcatgcaacccaatataaccttccggaaccacactgccaacaccgctcccccagccatgcattgaagtgaaccctgctgattacaatgacaatgaagaacccaattctctcgaccgtgaatcacttgagaatgaaaaatatctatagtggcacaacatagacataaatgcatgcatcttctcataatttttaactcctcaggatttagaaacatatcccagggaataggaagctcttgcagaacagtaaagctggcagaacaaggaagaccacgaacacaacttacactatgcatagtcatagtatcacaatctggcaacagcgggtggtcttcagtcatagaagctcgggtttcattttcctcacaacgtggtaactgggctctggtgtaagggtgatgtctggcgcatgatgtcgagcgtgcgcgcaaccttgtcataatggagttgcttcctgacattctcgtattttgtatagcaaaacgcggccctggcagaacacactcttcttcgccttctatcctgccgcttagcgtgttccgtgtgatagttcaagtacaaccacactcttaagttggtcaaaagaatgctggcttcagttgtaatcaaaactccatcgcatctaatcgttctgaggaaatcatccaagcaatgcaactggattgtgtttcaagcaggagaggagagggaagagacggaagaaccatgttaatttttattccaaacgatctcgcagtacttcaaattgtagatcgcgcagatggcatctctcgcccccactgtgttggtgaaaaagcacagctagatcaaaagaaatgcgattttcaaggtgctcaacggtggcttccagcaaagcctccacgcgcacatccaagaacaaaagaataccaaaagaaggagcattttctaactcctcaatcatcatattacattcctgcaccattcccagataattttcagctttccagccttgaattattcgtgtcagttcttgtggtaaatccaatccacacattacaaacaggtcccggagggcgccctccaccaccattcttaaacacaccctcataatgacaaaatatcttgctcctgtgtcacctgtagcgaattgagaatggcaacatcaattgacatgcccttggctctaagttcttctttaagttctagttgtaaaaactctctcatattatcaccaaactgcttagccagaagccccccgggaacaagagcaggggacgctacagtgcagtacaagcgcagacctccccaattggctccagcaaaaacaagattggaataagcatattgggaaccgccagtaatatcatcgaagttgctggaaatataatcaggcagagtttcttgtaaaaattgaataaaagaaaaatttgccaaaaaaacattcaaaacctctgggatgcaaatgcaataggttaccgcgctgcgctccaacattgttagttttgaattagtctgcaaaaataaaaaaaaaaacaagcgtcatatcatagtagcctgacgaacagatggataaatcagtctttccatcacaagacaagccacagggtctccagctcgaccctcgtaaaacctgtcatcatgattaaacaacagcaccgaaagttcctcgcggtgaccagcatgaataattcttgatgaagcatacaatccagacatgttagcatcagttaacgagaaaaaacagccaacatagcctttgggtataattatgcttaatcgtaagtatagcaaagccacccctcgcggatacaaagtaaaaggcacaggagaataaaaaatataattatttctctgctgctgttcaggcaacgtcgcccccggtccctctaaatacacatacaaagcctcatcagccatggcttaccagacaaagtacagcgggcacacaaagcacaagctctaaagtgactctccaacctctccacaatatatatatacacaagccctaaactgacgtaatgggagtaaagtgtaaaaaatcccgccaaacccaacacacaccccgaaactgcgtcaccagggaaaagtacagtttcacttccgcaatcccaacaggcgtaacttcctctttctcacggtacgtgatatcccactaacttgcaacgtcattttcccacggtcgcaccgccccttttagccgttaaccccacagccaatcaccacacgatccacactttttaaaatcacctcatttacatattggcaccattccatctataaggtatattatatagataga

SEQ ID NO: 105 - DNA, 35344 bp, Artificial Sequence
  Genome sequence of NG-762 virus
tctatctatataatataccttatagatggaatggtgccaatatgtaaatgaggtgattttaaaaagtgtggatcgtgtggtgattggctgtggggttaacggctaaaaggggcggtgcgaccgtgggaaaatgacgttttgtgggggtggagtttttttgcaagttgtcgcgggaaatgtgacgcataaaaaggcttttttctcacggaactacttagttttcccacggtatttaacaggaaatgaggtagttttgaccggatgcaagtgaaaattgttgattttcgcgcgaaaactgaatgaggaagtgtttttctgaataatgtggtatttatggcagggtggagtatttgttcagggccaggtagactttgacccattacgtggaggtttcgattaccgtgttttttacctgaatttccgcgtaccgtgtcaaagtcttctgtttttacgtaggtgtcagctgatcgctagggtatttatacctcagggtttgtgtcaagaggccactcttgagtgccagcgagaagagttttctcctctgcgccggcagtttaataataaaaaaatgagagatttgcgatttctgcctcaggaaataatctctgctgagactggaaatgaaatattggagcttgtggtgcacgccctgatgggagacgatccggagccacctgtgcagctttttgagcctcctacgcttcaggaactgtatgatttagaggtagagggatcggaggattctaatgaggaagctgtaaatggcttttttaccgattctatgcttttagctgctaatgaagggttagaattagatccgcctttggacacttttgatactccaggggtaattgtggaaagcggtacaggtgtaagaaaattacctgatttgagttccgtggactgtgatttgcactgctatgaagacgggtttcctccgagtgatgaggaggaccatgaaaaggagcagtccatgcagactgcagcgggtgagggagtgaaggctgccaatgttggttttcagttggattgcccggagcttcctggacatggctgtaagtcttgtgaatttcacaggaaaaatactggagtaaaggaactgttatgttcgctttgttatatgagaacgcactgccactttatttacagtaagtgtgtttaagttaaaatttaaaggaatatgctgtttttcacatgtatattgagtgtgagttttgtgcttcttattataggtcctgtgtctgatgctgatgaatcaccatctcctgattctactacctcacctcctgagattcaagcacctgttcctgtggacgtgcgcaagcccattcctgtgaagcttaagcctgggaaacgtccagcagtggaaaaacttgaggacttgttacagggtggggacggacctttggacttgagtacacggaaacgtccaagacaataagtgttccatatccgtgtttacttaaggtgacgtcaatatttgtgtgacagtgcaatgtaataaaaatatgttaactgttcactggtttttattgctttttgggcggggactcaggtatataagtagaagcagacctgtgtggttagctcataggagctggctttcatccatggaggtttgggccattttggaagaccttaggaagactaggcaactgttagagaacgcttcggacggagtctccggtttttggagattctggttcgctagtgaattagctagggtagtttttaggataaaacaggactataaacaagaatttgaaaagttgttggtagattgcccaggactttttgaagctcttaatttgggccatcaggttcactttaaagaaaaagttttatcagttttagacttttcaaccccaggtagaactgctgctgctgtggcttttcttacttttatattagataaatggatcccgcagactcatttcagcaggggatacgttttggatttcatagccacagcattgtggagaacatggaaggttcgcaagatgaggacaatcttaggttactggccagtgcagcctttgggtgtagcgggaatcctgaggcatccaccggtcatgccagcggttctggaggaggaacagcaagaggacaacccgagagccggcctggaccctccagtggaggaggcggagtagctgacttgtctcctgaactgcaacgggtgcttactggatctacgtccactggacgggataggggcgttaagagggagagggcatctagtggtactgatgctagatctgagttggctttaagtttaatgagtcgcagacgtcctgaaaccatttggtggcatgaggttcagaaagagggaagggatgaagtttctgtattgcaggagaaatattcactggaacaggtgaaaacatgttggttggagcctgaggatgattgggaggtggccattaaaaattatgccaagatagctttgaggcctgataaacagtataagattactagacggattaatatccggaatgcttgttacatatctggaaatggggctgaggtggtaatagatactcaagacaaggcagttattagatgctgcatgatggatatgtggcctggggtagtcggtatggaagcagtaacttttgtaaatgttaagtttaggggagatggttataatggaatagtgtttatggccaataccaaacttatattgcatggttgtagcttttttggtttcaacaatacctgtgtagatgcctggggacaggttagtgtacggggatgtagtttctatgcgtgttggattgccacagctggcagaaccaagagtcaattgtctctgaagaaatgcatatttcaaagatgtaacctgggcattctgaatgaaggcgaagcaagggtccgccactgcgcttctacagatactggatgttttattttgattaagggaaatgccagcgtaaagcataacatgatttgcggtgcttccgatgagaggccttatcaaatgctcacttgtgctggtgggcattgtaatatgctggctactgtgcatattgtttcccatcaacgcaaaaaatggcctgtttttgatcacaatgtgatgacgaagtgtaccatgcatgcaggtgggcgtagaggaatgtttatgccttaccagtgtaacatgaatcatgtgaaagtgttgttggaaccagatgccttttccagaatgagcctaacaggaatttttgacatgaacatgcaaatctggaagatcctgaggtatgatgatacgagatcgagggtacgcgcatgcgaatgcggaggcaagcatgccaggttccagccggtgtgtgtagatgtgactgaagatctcagaccggatcatttggttattgcccgcactggagcagagttcggatccagtggagaagaaactgactaaggtgagtattgggaaaactttggggtgggattttcagatggacagattgagtaaaaatttgttttttctgtcttgcagctgtcatgagtggaaacgcttcttttaaggggggagtcttcagcccttatctgacagggcgtctcccatcctgggcaggagttcgtcagaatgttatgggatctactgtggatggaagacccgtccaacccgccaattcttcaacgctgacctatgctactttaagttcttcacctttggacgcagctgcagctgccgccgccgcttctgttgccgctaacactgtgcttggaatgggttactatggaagcatcatggctaattccacttcctctaataacccttctaccctgactcaggacaagttacttgtccttttggcccagctggaggctttgacccaacgtctgggtgaactttctcagcaggtggtcgagttgcgagtacaaactgagtctgctgtcggcacggcaaagtctaaataaaaaaatcccagaatcaatgaataaataaacaagcttgttgttgatttaaaatcaagtgtttttatttcatttttcgcgcacggtatgccctagaccaccgatctctatcattgagaactcggtggattttttccaggatcctatagaggtgggattgaatgtttagatacatgggcattaggccgtctttggggtggagatagctccattgaagggattcatgctccggggtagtgttgtaaatcacccagtcataacaaggtcgcagtgcatggtgttgcacaatatcttttagaagtaggctgattgccacagataagcccttggtgtaggtgtttacaaaccggttgagctgggatgggtgcattcggggtgaaattatgtgcattttggattggatttttaagttggcaatattgccgccaagatcccgtcttgggttcatgttatgaaggaccaccaagacggtgtatccggtacatttaggaaatttatcgtgcagcttggatggaaaagcgtggaaaaatttggagacacccttgtgtcctccaagattttccatgcactcatccatgataatagcaatggggccgtgggcagcggcgcgggcaaacacgttccgtgggtctgacacatcatagttatgttcctgagttaaatcatcataagccattttaatgaatttggggcggagagtaccagattggggtatgaatgttccttcgggccccggagcatagttcccctcacagatttgcatttcccaagctttcagttccgagggtggaatcatgtccacctggggggctatgaaaaacaccgtttctggggcgggggtgattaattgtgatgatagcaaatttctgagcaattgagatttgccacatccggtggggccataaatgattccgattacgggttgcaggtggtagtttagggaacggcaactgccgtcttctcgaagcaagggggccacctcgttcatcatttcccttacatgcatattttcccgcaccaaatccattaggaggcgctctcctcctagtgatagaagttcttgtagtgaggaaaagtttttcagcggtttcagaccgtcagccatgggcattttggagagagtttgctgcaaaagttctagtctgttccacagttcagtgatgtgttctatggcatctcgatccagcagacctcctcgtttcgcgggtttggacggctcctggaatagggtatgagacgatgggcgtccagcgctgccagggttcggtccttccagggtctcagtgttcgagtcagggttgtttccgtcacagtgaaggggtgtgcgcctgcttgggcgcttgccagggtgcgcttcagactcatcctgctggtcgaaaacttctgtcgcttggcgccctgtatgtcggccaagtagcagtttaccatgagttcgtagttgagcgcctcggctgcgtggcctttggcgcggagcttacctttggaagttttcttgcataccgggcagtataggcatttcagcgcatacaacttgggcgcaaggaaaacggattctggggagtatgcatctgcgccgcaggaggcgcaaacagtttcacattccaccagccaggttaaatccggttcattggggtcaaaaacaagttttccgccatattttttgatgcgtttcttacctttggtctccatgagttcgtgtcctcgttgagtgacaaacaggctgtccgtgtccccgtagactgattttacaggcctcttctccagtggagtgcctcggtcttcttcgtacaggaactctgaccactctgatacaaaggcgcgcgtccaggccagcacaaaggaggctatgtgggaggggtagcgatcgttgtcaaccagggggtccaccttttccaaagtatgcaaacacatgtcaccctcttcaacatccaggaatgtgattggcttgtaggtgtatttcacgtgacctggggtccccgctgggggggtataaaagggggcggttctttgctcttcctcactgtcttccggatcgctgtccaggaacgtcagctgttggggtaggtattccctctcgaaggcgggcatgacctctgcactcaggttgtcagtttctaagaacgaggaggatttgatattgacagtgccggttgagatgcctttcatgaggttttcgtccatctggtcagaaaacacaatttttttattgtcaagtttggtggcaaatgatccatacagggcgttggataaaagtttggcaatggatcgcatggtttggttcttttccttgtccgcgcgctctttggcggcgatgttgagttggacatactcgcgtgccaggcacttccattcggggaagatagttgttaattcatctggcacgattctcacttgccaccctcgattatgcaaggtaattaaatccacactggtggccacctcgcctcgaaggggttcattggtccaacagagcctacctcctttcctagaacagaaagggggaagtgggtctagcataagttcatcgggagggtctgcatccatggtaaagattcccggaagtaaatccttatcaaaatagctgatgggagtggggtcatctaaggccatttgccattctcgagctgccagtgcgcgctcatatgggttaaggggactgccccatggcatgggatgggtgagtgcagaggcatacatgccacagatgtcatagacgtagatgggatcctcaaagatgcctatgtaggttggatagcatcgcccccctctgatacttgctcgcacatagtcatatagttcatgtgatggcgctagcagccccggacccaagttggtgcgattgggtttttctgttctgtagacgatctggcgaaagatggcgtgagaattggaagagatggtgggtctttgaaaaatgttgaaatgggcatgaggtagacctacagagtctctgacaaagtgggcataagattcttgaagcttggttaccagttcggcggtgacaagtacgtctagggcgcagtagtcaagtgtttcttgaatgatgtcataacctggttggtttttcttttcccacagttcgcggttgagaaggtattcttcgcgatccttccagtactcttctagcggaaacccgtctttgtctgcacggtaagatcctagcatgtagaactgattaactgccttgtaagggcagcagcccttctctacgggtagagagtatgcttgagcagcttttcgtagcgaagcgtgagtaagggcaaaggtgtctctgaccatgactttgaggaattggtatttgaagtcgatgtcgtcacaggctccctgttcccagagttggaagtctacccgtttcttgtaggcggggttgggcaaagcgaaagtaacatcattgaagagaatcttgccggccctgggcatgaaattgcgagtgatgcgaaaaggctgtggtacttccgctcggttattgataacctgggcagctaggacgatctcgtcgaaaccgttgatgttgtgtcctacgatgtataattctatgaaacgcggcgtgcctctgacgtgaggtagcttactgagctcatcaaaggttaggtctgtggggtcagataaggcgtagtgttcgagagcccattcgtgcaggtgaggattcgctttaaggaaggaggaccagaggtccactgccagtgctgtttgtaactggtcccggtactgacgaaaatgccgtccgactgccattttttctggggtgacgcaatagaaggtttgggggtcctgccgccagcgatcccacttgagttttatggcgaggtcataggcgatgttgacgagccgctggtctccagagagtttcatgaccagcatgaaggggattagctgcttgccaaaggaccccatccaggtgtaggtttccacatcgtaggtgagaaagagcctttctgtgcgaggatgagagccaatcgggaagaactggatctcctgccaccagttggaggaatggctgttgatgtgatggaagtagaactccctgcgacgcgccgagcattcatgcttgtgcttgtacagacggccgcagtagtcgcagcgttgcacgggttgtatctcgtgaatgagttgtacctggcttcccttgacgagaaatttcagtgggaagccgaggcctggcgattgtatctcgtgctttactatgttgtctgcatcggcctgttcatcttctgtctcgatggtggtcatgctgacgagccctcgcgggaggcaagtccagacctcggcgcggcaggggcggagctcgaggacgagagcgcgcaggctggagctgtccagggtcctgagacgctgcggactcaggttagtaggcagtgtcaggagattaacttgcatgatcttttggagggcgtgcgggaggttcagatagtacttgatctcaacgggtccgttggtggagatgtcgatggcttgcagggttccgtgtcccttgggcgctaccaccgtgcccttgtttttcattttggacggcggtggctctgttgcttcttgcatgtttagaagcggtgtcgagggcgcgcaccgggcggcaggggcggctcgggacccggcggcatggctggcagtggtacgtcggcgccgcgcgcgggtaggttctggtactgcgccctgagaagactcgcatgcgcgacgacgcggcggttgacatcctggatctgacgcctctgggtgaaagctaccggccccgtgagcttgaacctgaaagagagttcaacagaatcaatctcggtatcgttgacggcggcttgcctaaggatttcttgcacgtcaccagagttgtcctggtaggcgatctccgccatgaactgctcgatctcttcctcttgaagatctccgcggcccgctctctcgacggtggccgcgaggtcgttggagatgcgcccaatgagttgagagaatgcattcatgcccgcctcgttccagacgcggctgtagaccacggcccccacgggatctctcgcgcgcatgaccacctgggcgaggttgagctccacgtggcgggtgaagaccgcatagttgcataggcgctggaaaaggtagttgagtgtggtggcgatgtgctcggtgacgaagaaatacatgatccatcgtctcagcggcatctcgctgacatcgcccagagcttccaagcgctccatggcctcgtagaagtccacggcaaaattaaaaaactgggagtttcgcgcggacacggtcaactcctcttccagaagacggataagttcggcgatggtggtgcgcacctcgcgctcgaaagcccctgggatttcttcctcaatctcttcttcttccactaacatctcttcctcttcaggtggggctgcaggaggagggggaacgcggcgacgccggcggcgcacgggcagacggtcgatgaatctttcaatgacctctccgcggcggcggcgcatggtttcagtgacggcgcggccgttctcgcgcggtcgcagagtaaaaacaccgccgcgcatctccttaaagtggtgactgggaggttctccgtttgggagggagagggcgctgattatacattttattaattggcccgtagggactgcacgcagagatctgatcgtgtcaagatccacgggatctgaaaacctttcgacgaaagcgtctaaccagtcacagtcacaaggtaggctgagtacggcttcttgtgggcgggggtggttatgtgttcggtctgggtcttctgtttcttcttcatctcgggaaggtgagacgatgctgctggtgatgaaattaaagtaggcagttctaagacggcggatggtggcgaggagcaccaggtctttgggtccggcttgctggatacgcaggcgattggccattccccaagcattatcctgacatctagcaagatctttgtagtagtcttgcatgagccgttctacgggcacttcttcctcacccgttctgccatgcatacgtgtgagtccaaatccgcgcattggttgtaccagtgccaagtcagctacgactctttcggcgaggatggcttgctgtacttgggtaagggtggcttgaaagtcatcaaaatccacaaagcggtggtaagctcctgtattaatggtgtaagcacagttggccatgactgaccagttaactgtctggtgaccagggcgcacgagctcggtgtatttaaggcgcgaataggcgcgggtgtcaaagatgtaatcgttgcaggtgcgcaccagatactggtaccctataagaaaatgcggcggtggttggcggtagagaggccatcgttctgtagctggagcgccaggggcgaggtcttccaacataaggcggtgatagccgtagatgtacctggacatccaggtgattcctgcggcggtagtagaagcccgaggaaactcgcgtacgcggttccaaatgttgcgtagcggcatgaagtagttcattgtaggcacggtttgaccagtgaggcgcgcgcagtcattgatgctctatagacacggagaaaatgaaagcgttcagcgactcgactccgtagcctggaggaacgtgaacgggttgggtcgcggtgtaccccggttcgagacttgtactcgagccggccggagccgcggctaacgtggtattggcactcccgtctcgacccagcctacaaaaatccaggatacggaatcgagtcgttttgctggtttccgaatggcagggaagtgagtcctattttttttttttgccgctcagatgcatcccgtgctgcgacagatgcgcccccaacaacagcccccctcgcagcagcagcagcagcaatcacaaaaggctgtccctgcaactactgcaactgccgccgtgagcggtgcgggacagcccgcctatgatctggacttggaagagggcgaaggactggcacgtctaggtgcgccttcacccgagcggcatccgcgagttcaactgaaaaaagattctcgcgaggcgtatgtgccccaacagaacctatttagagacagaagcggcgaggagccggaggagatgcgagcttcccgctttaacgcgggtcgtgagctgcgtcacggtttggaccgaagacgagtgttgcgggacgaggatttcgaagttgatgaaatgacagggatcagtcctgccagggcacacgtggctgcagccaaccttgtatcggcttacgagcagacagtaaaggaagagcgtaacttccaaaagtcttttaataatcatgtgcgaaccctgattgcccgcgaagaagttacccttggtttgatgcatttgtgggatttgatggaagctatcattcagaaccctactagcaaacctctgaccgcccagctgtttctggtggtgcaacacagcagagacaatgaggctttcagagaggcgctgctgaacatcaccgaacccgaggggagatggttgtatgatcttatcaacattctacagagtatcatagtgcaggagcggagcctgggcctggccgagaaggtggctgccatcaattactcggttttgagcttgggaaaatattacgctcgcaaaatctacaagactccatacgttcccatagacaaggaggtgaagatagatgggttctacatgcgcatgacgctcaaggtcttgaccctgagcgatgatcttggggtgtatcgcaatgacagaatgcatcgcgcggttagcgccagcaggaggcgcgagttaagcgacagggaactgatgcacagtttgcaaagagctctgactggagctggaaccgagggtgagaattacttcgacatgggagctgacttgcagtggcagcctagtcgcagggctctgagcgccgcgacggcaggatgtgagcttccttacatagaagaggcggatgaaggcgaggaggaagagggcgagtacttggaagactgatggcacaacccgtgttttttgctagatggaacagcaagcaccggatcccgcaatgcgggcggcgctgcagagccagccgtccggcattaactcctcggacgattggacccaggccatgcaacgtatcatggcgttgacgactcgcaaccccgaagcctttagacagcaaccccaggccaaccgtctatcggccatcatggaagctgtagtgccttcccgctctaatcccactcatgagaaggtcctggccatcgtgaacgcgttggtggagaacaaagctattcgtccagatgaggccggactggtatacaacgctctcttagaacgcgtggctcgctacaacagtagcaatgtgcaaaccaatttggaccgtatgataacagatgtacgcgaagccgtgtctcagcgcgaaaggttccagcgtgatgccaacctgggttcgctggtggcgttaaatgctttcttgagtactcagcctgctaatgtgccgcgtggtcaacaggattatactaactttttaagtgctttgagactgatggtatcagaagtacctcagagcgaagtgtatcagtccggtcctgattacttctttcagactagcagacagggcttgcagacggtaaatctgagccaagcttttaaaaaccttaaaggtttgtggggagtgcatgccccggtaggagaaagagcaaccgtgtctagcttgttaactccgaactcccgcctattattactgttggtagctcctttcaccgacagcggtagcatcgaccgtaattcctatttgggttacctactaaacctgtatcgcgaagccatagggcaaagtcaggtggacgagcagacctatcaagaaattacccaagtcagtcgcgctttgggacaggaagacactggcagtttggaagccactctgaacttcttgcttaccaatcggtctcaaaagatccctcctcaatatgctcttactgcggaggaggagaggatccttagatatgtgcagcagagcgtgggattgtttctgatgcaagagggggcaactccgactgcagcactggacatgacagcgcgaaatatggagcccagcatgtatgccagtaaccgacctttcattaacaaactgctggactacttgcacagagctgccgctatgaactctgattatttcaccaatgccatcttaaacccgcactggctgcccccacctggtttctacacgggcgaatatgacatgcccgaccctaatgacggatttctgtgggacgacgtggacagcgatgttttttcacctctttctgatcatcgcacgtggaaaaaggaaggcggcgatagaatgcattcttctgcatcgctgtccggggtcatgggtgctaccgcggctgagcccgagtctgcaagtccttttcctagtctacccttttctctacacagtgtacgtagcagcgaagtgggtagaataagtcgcccgagtttaatgggcgaagaggagtatctaaacgattccttgctcagaccggcaagagaaaaaaatttcccaaacaatggaatagaaagtttggtggataaaatgagtagatggaagacttatgctcaggatcacagagacgagcctgggatcatggggattacaagtagagcgagccgtagacgccagcgccatgacagacagaggggtcttgtgtgggacgatgaggattcggccgatgatagcagcgtgctggacttgggtgggagaggaaggggcaacccgtttgctcatttgcgccctcgcttgggtggtatgttgtaaaaaaaaataaaaaaaaaactcaccaaggccatggcgacgagcgtacgttcgttcttctttattatctgtgtctagtataatgaggcgagtcgtgctaggcggagcggtggtgtatccggagggtcctcctccttcgtacgagagcgtgatgcagcagcagcaggcgacggcggtgatgcaatccccactggaggctccctttgtgcctccgcgatacctggcacctacggagggcagaaacagcattcgttattcggaactggcacctcagtacgataccaccaggttgtatctggtggacaacaagtcggcggacattgcttctctgaactatcagaatgaccacagcaacttcttgaccacggtggtgcaaaacaatgactttacccctacggaagccagcacccagaccattaactttgatgaacgatcgcggtggggcggtcagctaaagaccatcatgcatactaacatgccaaacgtgaacgagtatatgtttagtaacaagttcaaagcgcgtgtgatggtgtccagaaaacctcccgacggtgctgcagttggggatacttatgatcacaagcaggatattttgaaatatgagtggttcgagtttactttgccagaaggcaacttttcagttactatgactattgatttgatgaacaatgccatcatagataattacttgaaagtgggtagacagaatggagtgcttgaaagtgacattggtgttaagttcgacaccaggaacttcaagctgggatgggatcccgaaaccaagttgatcatgcctggagtgtatacgtatgaagccttccatcctgacattgtcttactgcctggctgcggagtggattttaccgagagtcgtttgagcaaccttcttggtatcagaaaaaaacagccatttcaagagggttttaagattttgtatgaagatttagaaggtggtaatattccggccctcttggatgtagatgcctatgagaacagtaagaaagaacaaaaagccaaaatagaagctgctacagctgctgcagaagctaaggcaaacatagttgccagcgactctacaagggttgctaacgctggagaggtcagaggagacaattttgcgccaacacctgttccgactgcagaatcattattggccgatgtgtctgaaggaacggacgtgaaactcactattcaacctgtagaaaaagatagtaagaatagaagctataatgtgttggaagacaaaatcaacacagcctatcgcagttggtatctttcgtacaattatggcgatcccgaaaaaggagtgcgttcctggacattgctcaccacctcagatgtcacctgcggagcagagcaggtctactggtcgcttccagacatgatgaaggatcctgtcactttccgctccactagacaagtcagtaactaccctgtggtgggtgcagagcttatgcccgtcttctcaaagagcttctacaacgaacaagctgtgtactcccagcagctccgccagtccacctcgcttacgcacgtcttcaaccgctttcctgagaaccagattttaatccgtccgccggcgcccaccattaccaccgtcagtgaaaacgttcctgctctcacagatcacgggaccctgccgttgcgcagcagtatccggggagtccaacgtgtgaccgttactgacgccagacgccgcacctgtccctacgtgtacaaggcactgggcatagtcgcaccgcgcgtcctttcaagccgcactttctaaaaaaaaaaaaaatgtccattcttatctcgcccagtaataacaccggttggggtctgcgcgctccaagcaagatgtacggaggcgcacgcaaacgttctacccaacatcctgtccgtgttcgcggacattttcgcgctccatggggcgccctcaagggccgcactcgcgttcgaaccaccgtcgatgatgtaatcgatcaggtggttgccgacgcccgtaattatactcctactgcgcctacatctactgtggatgcagttattgacagtgtagtggctgacgctcgcaactatgctcgacgtaagagccggcgaaggcgcattgccagacgccaccgagctaccactgccatgcgagccgcaagagctctgctacgaagagctagacgcgtggggcgaagagccatgcttagggcggccagacgtgcagcttcgggcgccagcgccggcaggtcccgcaggcaagcagccgctgtcgcagcggcgactattgccgacatggcccaatcgcgaagaggcaatgtatactgggtgcgtgacgctgccaccggtcaacgtgtacccgtgcgcacccgtccccctcgcacttagaagatactgagcagtctccgatgttgtgtcccagcggcgaggatgtccaagcgcaaatacaaggaagaaatgctgcaggttatcgcacctgaagtctacggccaaccgttgaaggatgaaaaaaaaccccgcaaaatcaagcgggttaaaaaggacaaaaaagaagaggaagatggcgatgatgggctggcggagtttgtgcgcgagtttgccccacggcgacgcgtgcaatggcgtgggcgcaaagttcgacatgtgttgagacctggaacttcggtggtctttacacccggcgagcgttcaagcgctacttttaagcgttcctatgatgaggtgtacggggatgatgatattcttgagcaggcggctgaccgattaggcgagtttgcttatggcaagcgtagtagaataacttccaaggatgagacagtgtcgatacccttggatcatggaaatcccacccctagtcttaaaccggtcactttgcagcaagtgttacccgtaactccgcgaacaggtgttaaacgcgaaggtgaagatttgtatcccactatgcaactgatggtacccaaacgccagaagttggaggacgttttggagaaagtaaaagtggatccagatattcaacctgaggttaaagtgagacccattaagcaggtagcgcctggtctgggggtacaaactgtagacattaagattcccactgaaagtatggaagtgcaaactgaacccgcaaagcctactgccacctccactgaagtgcaaacggatccatggatgcccatgcctattacaactgacgccgccggtcccactcgaagatcccgacgaaagtacggtccagcaagtctgttgatgcccaattatgttgtacacccatctattattcctactcctggttaccgaggcactcgctactatcgcagccgaaacagtacctcccgccgtcgccgcaagacacctgcaaatcgcagtcgtcgccgtagacgcacaagcaaaccgactcccggcgccctggtgcggcaagtgtaccgcaatggtagtgcggaacctttgacactgccgcgtgcgcgttaccatccgagtatcatcacttaatcaatgttgccgctgcctccttgcagatatggccctcacttgtcgccttcgcgttcccatcactggttaccgaggaagaaactcgcgccgtagaagagggatgttgggacgcggaatgcgacgctacaggcgacggcgtgctatccgcaagcaattgcggggtggttttttaccagccttaattccaattatcgctgctgcaattggcgcgataccaggcatagcttccgtggcggttcaggcctcgcaacgacattgacattggaaaaaaacgtataaataaaaaaaaaaaaatacaatggactctgacactcctggtcctgtgactatgttttcttagagatggaagacatcaatttttcatccttggctccgcgacacggcacgaagccgtacatgggcacctggagcgacatcggcacgagccaactgaacgggggcgccttcaattggagcagtatctggagcgggcttaaaaattttggctcaaccataaaaacatacgggaacaaagcttggaacagcagtacaggacaggcgcttagaaataaacttaaagaccagaacttccaacaaaaagtagtcgatgggatagcttccggcatcaatggagtggtagatttggctaaccaggctgtgcagaaaaagataaacagtcgtttggacccgccgccagcaaccccaggtgaaatgcaagtggaggaagaaattcctccgccagaaaaacgaggcgacaagcgtccgcgtcccgatttggaagagacgctggtgacgcgcgtagatgaaccgccttcttatgaggaagcaacgaagcttggaatgcccaccactagaccgatagccccaatggccaccggggtgatgaaaccttctcagttgcatcgacccgtcaccttggatttgccccctccccctgctgctactgctgtacccgcttctaagcctgtcgctgccccgaaaccagtcgccgtagccaggtcacgtcccgggggcgctcctcgtccaaatgcgcactggcaaaatactctgaacagcatcgtgggtctaggcgtgcaaagtgtaaaacgccgtcgctgcttttaattaaatatggagtagcgcttaacttgcctatctgtgtatatgtgtcattacacgccgtcacagcagcagaggaaaaaaggaagaggtcgtgcgtcgacgctgagttactttcaagatggccaccccatcgatgctgccccaatgggcatacatgcacatcgccggacaggatgcttcggagtacctgagtccgggtctggtgcagttcgcccgcgccacagacacctacttcaatctgggaaataagtttagaaatcccaccgtagcgccgacccacgatgtgaccaccgaccgtagccagcggctcatgttgcgcttcgtgcccgttgaccgggaggacaatacatactcttacaaagtgcggtacaccctggccgtgggcgacaacagagtgctggatatggccagcacgttctttgacattaggggtgtgttggacagaggtcccagtttcaaaccctattctggtacggcttacaactccctggctcctaaaggcgctccaaatacatctcagtggattgcagaaggtgtaaaaaatacaactggtgaggaacacgtaacagaagaggaaaccaatactactacttacacttttggcaatgctcctgtaaaagctgaagctgaaattacaaaagaaggactcccagtaggtttggaagtttcagatgaagaaagtaaaccgatttatgctgataaaacatatcagccagaacctcagctgggagatgaaacttggactgaccttgatggaaaaaccgaaaagtatggaggcagggctctcaaacccgatactaagatgaaaccatgctacgggtcctttgccaaacctactaatgtgaaaggcggtcaggcaaaacaaaaaacaacggagcagccaaatcagaaagtcgaatatgatatcgacatggagttttttgatgcggcatcgcagaaaacaaacttaagtcctaaaattgtcatgtatgcagaaaatgtaaatttggaaactccagacactcatgtagtgtacaaacctggaacagaagacacaagttccgaagctaatttgggacaacaatctatgcccaacagacccaactacattggcttcagagataactttattggacttatgtactataacagtactggtaacatgggggtgctggctggtcaagcgtctcagttaaatgcagtggttgacttgcaggacagaaacacagaactttcttaccaactcttgcttgactctctgggcgacagaaccagatactttagcatgtggaatcaggctgtggacagttatgatcctgatgtacgtgttattgaaaatcatggtgtggaagatgaacttcccaactactgttttccactggacggcataggtgttccaacaaccagttacaaatcaatagttccaaatggagacaatgcgcctaattggaaggaacctgaagtaaatggaacaagtgagatcggacagggtaatttgtttgccatggaaattaaccttcaagccaatctatggcgaagtttcctttattccaatgtggctctatatctcccagactcgtacaaatacaccccgtccaatgtcactcttccagaaaacaaaaacacctacgactacatgaacgggcgggtggtgccgccatctctagtagacacctatgtgaacattggtgccaggtggtctctggatgccatggacaatgtcaacccattcaaccaccaccgtaacgctggcttgcgttaccgatccatgcttctgggtaacggacgttatgtgcctttccacatacaagtgcctcaaaaattcttcgctgttaaaaacctgctgcttctcccaggctcctacacttatgagtggaactttaggaaggatgtgaacatggttctacagagttccctcggtaacgacctgcgggtagatggcgccagcatcagtttcacgagcatcaacctctatgctacttttttccccatggctcacaacaccgcttccacccttgaagccatgctgcggaatgacaccaatgatcagtcattcaacgactacctatctgcagctaacatgctctaccccattcctgccaatgcaaccaatattcccatttccattccttctcgcaactgggcggctttcagaggctggtcatttaccagactgaaaaccaaagaaactccctctttggggtctggatttgacccctactttgtctattctggttctattccctacctggatggtaccttctacctgaaccacacttttaagaaggtttccatcatgtttgactcttcagtgagctggcctggaaatgacaggttactatctcctaacgaatttgaaataaagcgcactgtggatggcgaaggctacaacgtagcccaatgcaacatgaccaaagactggttcttggtacagatgctcgccaactacaacatcggctatcagggcttctacattccagaaggatacaaagatcgcatgtattcatttttcagaaacttccagcccatgagcaggcaggtggttgatgaggtcaattacaaagacttcaaggccgtcgccataccctaccaacacaacaactctggctttgtgggttacatggctccgaccatgcgccaaggtcaaccctatcccgctaactatccctatccactcattggaacaactgccgtaaatagtgttacgcagaaaaagttcttgtgtgacagaaccatgtggcgcataccgttctcgagcaacttcatgtctatgggggcccttacagacttgggacagaatatgctctatgccaactcagctcatgctctggacatgacctttgaggtggatcccatggatgagcccaccctgctttatcttctcttcgaagttttcgacgtggtcagagtgcatcagccacaccgcggcatcatcgaggcagtctacctgcgtacaccgttctcggccggtaacgctaccacgtaagaagcttcttgcttcttgcaaatagcagctgcaaccatggcctgcggatcccaaaacggctccagcgagcaagagctcagagccattgtccaagacctgggttgcggaccctattttttgggaacctacgataagcgcttcccggggttcatggcccccgataagctcgcctgtgccattgtaaatacggccggacgtgagacggggggagagcactggttggctttcggttggaacccacgttctaacacctgctacctttttgatccttttggattctcggatgatcgtctcaaacagatttaccagtttgaatatgagggtctcctgcgccgcagcgctcttgctaccaaggaccgctgtattacgctggaaaaatctacccagaccgtgcagggtccccgttctgccgcctgcggacttttctgctgcatgttccttcacgcctttgtgcactggcctgaccgtcccatggacggaaaccccaccatgaaattgctaactggagtgccaaacaacatgcttcattctcctaaagtccagcccaccctgtgtgacaatcaaaaagcactctaccattttcttaatacccattcgccttattttcgctcccatcgtacacacatcgaaagggccactgcgttcgaccgtatggatgttcaataatgactcatgtaaacaacgtgttcaataaacatcactttatttttttacatgtatcaaggctctgcattacttatttatttacaagtcgaatgggttctgacgagaatcagaatgacccgcaggcagtgatacgttgcggaactgatacttgggttgccacttgaattcgggaatcaccaacttgggaaccggtatatcgggcaggatgtcactccacagctttctggtcagctgcaaagctccaagcaggtcaggagccgaaatcttgaaatcacaattaggaccagtgctttgagcgcgagagttgcggtacaccggattgcagcactgaaacaccatcagcgacggatgtctcacgcttgccagcacggtgggatctgcaatcatgcccacatccagatcttcagcattggcaatgctgaacggggtcatcttgcaggtctgcctacccatggcgggcacccaattaggcttgtggttgcaatcgcagtgcagggggatcagtatcatcttggcctgatcctgtctgattcctggatacacggctctcatgaaagcatcatattgcttgaaagcctgctgggctttactaccctcggtataaaacatcccgcaggacctgctcgaaaactggttagctgcacagccggcatcattcacacagcagcgggcgtcattgttagctatttgcaccacacttctgccccagcggttttgggtgattttggttcgctcgggattctcctttaaggctcgttgtccgttctcgctggccacatccatctcgataatctgctccttctgaatcataatattgccatgcaggcacttcagcttgccctcataatcattgcagccatgaggccacaacgcacagcctgtacattcccaattatggtgggcgatctgagaaaaagaatgtatcattccctgcagaaatcttcccatcatcgtgctcagtgtcttgtgactagtgaaagttaactggatgcctcggtgctcctcgtttacgtactggtgacagatgcgcttgtattgttcgtgttgctcaggcattagtttaaaagaggttctaagttcgttatccagcctgtacttctccatcagcagacacatcacttccatgcctttctcccaagcagacaccaggggcaagctaatcggattcttaacagtgcaggcagcagctcctttagccagagggtcatctttagcgatcttctcaatgcttcttttgccatccttctcaacgatgcgcacgggcgggtagctgaaacccactgctacaagttgcgcctcttctctttcttcttcgctgtcttgactgatgtcttgcatggggatatgtttggtcttccttggcttctttttggggggtatcggaggaggaggactgtcgctccgttccggagacagggaggattgtgacgtttcgctcaccattaccaactgactgtcggtagaagaacctgaccccacacggcgacaggtgtttctcttcgggggcagaggtggaggcgattgcgaagggctgcggtccgacctggaaggcggatgactggcagaaccccttccgcgttcgggggtgtgctccctgtggcggtcgcttaactgatttccttcgcggctggccattgtgttctcctaggcagagaaacaacagacatggaaactcagccattgctgtcaacatcgccacgagtgccatcacatctcgtcctcagcgacgaggaaaaggagcagagcttaagcattccaccgcccagtcctgccaccacctctaccctagaagataaggaggtcgacgcatctcatgacatgcagaataaaaaagcgaaagagtctgagacagacatcgagcaagacccgggctatgtgacaccggtggaacacgaggaagagttgaaacgctttctagagagagaggatgaaaactgcccaaaacaacgagcagataactatcaccaagatgctggaaatagggatcagaacaccgactacctcatagggcttgacggggaagacgcgctccttaaacatctagcaagacagtcgctcatagtcaaggatgcattattggacagaactgaagtgcccatcagtgtggaagagctcagccgcgcctacgagcttaacctcttttcacctcgtactccccccaaacgtcagccaaacggcacctgcgagccaaatcctcgcttaaacttttatccagcttttgctgtgccagaagtactggctacctatcacatcttttttaaaaatcaaaaaattccagtctcctgccgcgctaatcgcacccgcgccgatgccctactcaatctgggacctggttcacgcttacctgatatagcttccttggaagaggttccaaagatcttcgagggtctgggcaataatgagactcgggccgcaaatgctctgcaaaagggagaaaatggcatggatgagcatcacagcgttctggtggaattggaaggcgataatgccagactcgcagtactcaagcgaagcatcgaggtcacacacttcgcatatcccgctgtcaacctgccccctaaagtcatgacggcggtcatggaccagttactcattaagcgcgcaagtcccctttcagaagacatgcatgacccagatgcctgtgatgagggtaaaccagtggtcagtgatgagcagctaacccgatggctgggcaccgactctcccagggatttggaagagcgtcgcaagcttatgatggccgtggtgctggttaccgtagaactagagtgtctccgacgtttctttaccgattcagaaaccttgcgcaaactcgaagagaatctgcactacacttttagacacggctttgtgcggcaggcatgcaagatatctaacgtggaactcaccaacctggtttcctacatgggtattctgcatgagaatcgcctaggacaaagcgtgctgcacagcaccctgaagggggaagcccgccgtgattacatccgcgattgtgtctatctgtacctgtgccacacgtggcaaaccggcatgggtgtatggcagcaatgtttagaagaacagaacttgaaagagcttgacaagctcttacagaaatctcttaaggttctgtggacagggttcgacgagcgcaccgtcgcttccgacctggcagacctcatcttcccagagcgtctcagggttactttgcgaaacggattgcctgactttatgagccagagcatgcttaacaattttcgctctttcatcctggaacgctccggtatcctgcccgccacctgctgcgcactgccctccgactttgtgcctctcacctaccgcgagtgccccccgccgctatggagtcactgctacctgttccgtctggccaactatctctcctaccactcggatgtgatcgaggatgtgagcggagacggcttgctggagtgtcactgccgctgcaatctgtgcacgccccaccggtccctagcttgcaacccccagttgatgagcgaaacccagataataggcacctttgaattgcaaggccccagcagccaaggcgatgggtcttctcctgggcaaagtttaaaactgaccccgggactgtggacctccgcctacttgcgcaagtttgctccggaagattaccacccctatgaaatcaagttctatgaggaccaatcacagcctccaaaggccgaactttcggcctgcgtcatcacccagggggcaattctggcccaattgcaagccatccaaaaatcccgccaagaatttctactgaaaaagggtaagggggtctaccttgacccccagaccggcgaggaactcaacacaaggttccctcaggatgtcccaacgacgagaaaacaagaagttgaaggtgcagccgccgcccccagaagatatggaggaagattgggacagtcaggcagaggaggcggaggaggacagtctggaggacagtctggaggaagacagtttggaggaggaaaacgaggaggcagaggaggtggaagaagtaaccgccgacaaacagttatcctcggctgcggagacaagcaacagcgctaccatctccgctccgagtcgaggaacccggcggcgtcccagcagtagatgggacgagaccggacgcttcccgaacccaaccagcgcttccaagaccggtaagaaggatcggcagggatacaagtcctggcgggggcataagaatgccatcatctcctgcttgcatgagtgcgggggcaacatatccttcacgcggcgctacttgctattccaccatggggtgaactttccgcgcaatgttttgcattactaccgtcacctccacagcccctactatagccagcaaatcccggcagtctcgacagataaagacagcggcggcgacctccaacagaaaaccagcagcggcagttagaaaatacacaacaagtgcagcaacaggaggattaaagattacagccaacgagccagcgcaaacccgagagttaagaaatcggatctttccaaccctgtatgccatcttccagcagagtcggggtcaagagcaggaactgaaaataaaaaaccgatctctgcgttcgctcaccagaagttgtttgtatcacaagagcgaagatcaacttcagcgcactctcgaggacgccgaggctctcttcaacaagtactgcgcgctgactcttaaagagtaggcagcgaccgcgcttattcaaaaaaggcgggaattacatcatcctcgacatgagtaaagaaattcccacgccttacatgtggagttatcaaccccaaatgggattggcggcaggcgcctcccaggactactccacccgcatgaattggctcagcgccgggccttctatgatttctcgagttaatgatatacgcgcctaccgaaaccaaatacttttggaacagtcagctcttaccaccacgccccgccaacaccttaatcccagaaattggcccgccgccctagtgtaccaggaaagtcccgctcccaccactgtattacttcctcgagacgcccaggccgaagtccaaatgactaatgcaggtgcgcagttagctggcggctccaccctatgtcgtcacaggcctcggcataatataaaacgcctgatgatcagaggccgaggtatccagctcaacgacgagtcggtgagctctccgcttggtctacgaccagacggaatctttcagattgccggctgcgggagatcttccttcacccctcgtcaggctgttctgactttggaaagttcgtcttcgcaaccccgctcgggcggaatcgggaccgttcaatttgtggaggagtttactccctctgtctacttcaaccccttctccggatctcctgggcattacccggacgagttcataccgaacttcgacgcgattagcgagtcagtggacggctacgattgatgtctggtgacgcggctgagctatctcggctgcgacatctagaccactgccgccgctttcgctgctttgcccgggaactcattgagttcatctacttcgaactccccaaggatcaccctcaaggtccggcccacggagtgcggatttctatcgaaggcaaaatagactctcgcctgcaacgaattttctcccagcggcccgtgctgatcgagcgagaccagggaaacaccacggtttccatctactgcatttgtaatcaccccggattgcatgaaagcctttgctgtcttatgtgtactgagtttaataaaaactgaattaagactctcctacggactgccgcttcttcaacccggattttacaaccagaagaacgaaacttttcctgtcgtccaggactctgttaacttcacctttcctactcacaaactagaagctcaacgactacaccgcttttccagaagcattttccctactaatactactttcaaaaccggaggtgagctccaaggtcttcctacagaaaacccttgggtggaagcgggccttgtagtgctaggaattcttgcgggtgggcttgtgattattctttgctacctatacacaccttgcttcactttcttagtggtgttgtggtattggtttaaaaaatggggcccatactagtcttgcttgttttactttcgcttttggaaccgggttctgccaattacgatccatgtctagacttcgacccagaaaactgcacacttacttttgcacccgacacaagccgcatctgtggagttcatcgcctctcttacgaacttggcccccaacgacaaaaatttacctgcatggtgggaatcaaccccatagttatcacccagcaaagtggagatactaagggttgcattcactgctcctgcgattccatcgagtgcacctacaccctgctgaagaccctatgcggcctaagagacctgctaccaatgaattaaaaaatgattaataaaaaatcacttacttgaaatcagcaataaggtctctgttgaaattttctcccagcagcacctcacttccctcttcccaactctggtattctaaaccccgttcagcggcatactttctccatactttaaaggggatgtcaaattttagctcctctcctgtacccacaatcttcatgtctttcttcccagatgaccaagagagtccggctcagtgactccttcaaccctgtctacccctatgaagatgaaagcacctcccaacacccctttataaacccagggtttatttccccaaatggcttcacacaaagcccaaacggagttcttactttaaaatgtttaaccccactaacaaccacaggcggatctctacagctaaaagtgggagggggacttacagtggatgacaccaacggttttttgaaagaaaacataagtgccaccacaccactcgttaagactggtcactctataggtttaccactaggagccggattgggaacgaatgaaaataaactttgtatcaaattaggacaaggacttacattcaattcaaacaacatttgcattgatgacaatattaacaccttatggacaggagtcaaccccaccgaagccaactgtcaaatcatgaactccagtgaatctaatgattgcaaattaattctaacactagttaaaactggagcactagtcactgcatttgtttatgttataggagtatctaacaattttaatatgctaactacacacagaaatataaattttactgcagagctgtttttcgattctactggtaatttactaactagactctcatccctcaaaactccacttaatcataaatcaggacaaaacatggctactggtgccattactaatgctaaaggtttcatgcccagcacgactgcctatcctttcaatgataattctagagaaaaagaaaactacatttacggaacttgttactacacagctagtgatcgcactgcttttcccattgacatatctgtcatgcttaaccgaagagcaataaatgacgagacatcatattgtattcgtataacttggtcctggaacacaggagatgccccagaggtgcaaacctctgctacaaccctagtcacctccccatttaccttttactacatcagagaagacgactgacaaataaagtttgcgatcgccaggcccaccatggactggacctggcgcatcctgttcttggtggcagctgctacgggagctcattccaactgggtgaatgtaataagtgatttgaaaaaaattgaagatcttattcaatctatgcatattgatgctactttatatacggaaagtgatgttcaccccagttgcaaagtaacagcaatgaagtgctttctcttggagttacaagttatttcacttgagtccggagatgcaagtattcatgatacagtagaaaatctgatcatcctagcaaacaacagtttgtcttctaatgggaatgtaacagaatctggatgcaaagaatgtgaggaactggaggaaaaaaatattaaagaatttttgcagagttttgtacatattgtccaaatgttcatcaacacttctggaagcggagctactaacttcagcctgctgaagcaggctggagacgtggaggagaaccctggacctgccttgacctttgctttactggtggccctcctggtgctcagctgcaagtcaagctgctctgtgggctgtgatctgcctcaaacccacagcctgggtagcaggaggaccttgatgctcctggcacagatgaggagaatctctcttttctcctgcttgaaggacagacatgactttggatttccccaggaggagtttggcaaccagttccaaaaggctgaaaccatccctgtcctccatgagatgatccagcagatcttcaatctcttcagcacaaaggactcatctgctgcttgggatgagaccctcctagacaaattctacactgaactctaccagcagctgaatgacctggaagcctgtgtgatacagggggtgggggtgacagagactcccctgatgaaggaggactccattctggctgtgaggaaatacttccaaagaatcactctctatctgaaagagaagaaatacagcccttgtgcctgggaggttgtcagagcagaaatcatgagatctttttctttgtcaacaaacttgcaagaaagtttaagaagtaaggaaggaagcggacagtgtactaattatgctctcttgaaattggctggagatgttgagagcaaccctggacctatgtgtcaccagcagttggtcatctcttggttttccctggtttttctggcatctcccctcgtggccatatgggaactgaagaaagatgtttatgtcgtagaattggattggtatccggatgcccctggagaaatggtggtcctcacctgtgacacccctgaagaagatggtatcacctggaccttggaccagagcagtgaggtcttaggctctggcaaaaccctgaccatccaagtcaaagagtttggagatgctggccagtacacctgtcacaaaggaggcgaggttctaagccattcgctcctgctgcttcacaaaaaggaagatggaatttggtccactgatattttaaaggaccagaaagaacccaaaaataagacctttctaagatgcgaggccaagaattattctggacgtttcacctgctggtggctgacgacaatcagtactgatttgacattcagtgtcaaaagcagcagaggctcttctgacccccaaggggtgacgtgcggagctgctacactctctgcagagagagtcagaggggacaacaaggagtatgagtactcagtggagtgccaggaggacagtgcctgcccagctgctgaggagagtctgcccattgaggtcatggtggatgccgttcacaagctcaagtatgaaaactacaccagcagcttcttcatcagggacatcatcaaacctgacccacccaagaacttgcagctgaagccattaaagaattctcggcaggtggaggtcagctgggagtaccctgacacctggagtactccacattcctacttctccctgacattctgcgttcaggtccagggcaagagcaagagagaaaagaaagatagagtcttcacggacaagacctcagccacggtcatctgccgcaaaaatgccagcattagcgtgcgggcccaggaccgctactatagctcatcttggagcgaatgggcatctgtgccctgcagtggagggggcggcagcgggggaggcggcagcggcggcgggggatcgagaaacctccccgtggccactccagacccaggaatgttcccatgccttcaccactcccaaaacctgctgagggccgtcagcaacatgctccagaaggccagacaaactctagaattttacccttgcacttctgaagagattgatcatgaagatatcacaaaagataaaaccagcacagtggaggcctgtttaccattggaattaaccaagaatgagagttgcctaaattccagagagacctctttcataactaatgggagttgcctggcctccagaaagacctcttttatgatggccctgtgccttagtagtatttatgaagacttgaagatgtaccaggtggagttcaagaccatgaatgcaaagcttctgatggatcctaagaggcagatctttctagatcaaaacatgctggcagttattgatgagctgatgcaggccctgaatttcaacagtgagactgtgccacaaaaatcctcccttgaagaaccggatttttataaaactaaaatcaagctctgcatacttcttcatgctttcagaattcgggcagtgactattgatagagtgatgagctatctgaatgcttcctaagctagcttgactgactgagatacagcgtaccttcagctcacagacatgataagatacattgatgagtttggacaaaccacaactagaatgcagtgaaaaaaatgctttatttgtgaaatttgtgatgctattgctttatttgtaaccattataagctgcaataaacaagttaacaacaacaattgcattcattttatgtttcaggttcagggggaggtgtgggaggttttttaaagcaagtaaaacctctacaaatgtggtagtcgtcagctatcctgcaggaacttgtttatttgaaaatcaattcacaaaatccgagtagttattttgcctcccccttcccatttaacagaatacaccaatctctccccacgcacagctttaaacatttggataccattagatatagacatggttttagattccacattccaaacagtttcagagcgagccaatctggggtcagtgatagataaaaatccatcgggatagtcttttaaagcgctttcacagtccaactgctgcggatgcgactccggagtctggatcacggtcatctggaagaagaacgatgggaatcataatccgaaaacggtatcggacgattgtgtctcatcaaacccacaagcagccgctgtctgcgtcgctccgtgcgactgctgtttatgggatcagggtccacagtgtcctgaagcatgattttaatagcccttaacatcaactttctggtgcgatgcgcgcagcaacgcattctgatttcactcaaatctttgcagtaggtacaacacattattacaatattgtttaataaaccataattaaaagcgctccagccaaaactcatatctgatataatcgcccctgcatgaccatcataccaaagtttaatataaattaaatgacgttccctcaaaaacacactacccacatacatgatctcttttggcatgtgcatattaacaatctgtctgtaccatggacaacgttggttaatcatgcaacccaatataaccttccggaaccacactgccaacaccgctcccccagccatgcattgaagtgaaccctgctgattacaatgacaatgaagaacccaattctctcgaccgtgaatcacttgagaatgaaaaatatctatagtggcacaacatagacataaatgcatgcatcttctcataatttttaactcctcaggatttagaaacatatcccagggaataggaagctcttgcagaacagtaaagctggcagaacaaggaagaccacgaacacaacttacactatgcatagtcatagtatcacaatctggcaacagcgggtggtcttcagtcatagaagctcgggtttcattttcctcacaacgtggtaactgggctctggtgtaagggtgatgtctggcgcatgatgtcgagcgtgcgcgcaaccttgtcataatggagttgcttcctgacattctcgtattttgtatagcaaaacgcggccctggcagaacacactcttcttcgccttctatcctgccgcttagcgtgttccgtgtgatagttcaagtacaaccacactcttaagttggtcaaaagaatgctggcttcagttgtaatcaaaactccatcgcatctaatcgttctgaggaaatcatccaagcaatgcaactggattgtgtttcaagcaggagaggagagggaagagacggaagaaccatgttaatttttattccaaacgatctcgcagtacttcaaattgtagatcgcgcagatggcatctctcgcccccactgtgttggtgaaaaagcacagctagatcaaaagaaatgcgattttcaaggtgctcaacggtggcttccagcaaagcctccacgcgcacatccaagaacaaaagaataccaaaagaaggagcattttctaactcctcaatcatcatattacattcctgcaccattcccagataattttcagctttccagccttgaattattcgtgtcagttcttgtggtaaatccaatccacacattacaaacaggtcccggagggcgccctccaccaccattcttaaacacaccctcataatgacaaaatatcttgctcctgtgtcacctgtagcgaattgagaatggcaacatcaattgacatgcccttggctctaagttcttctttaagttctagttgtaaaaactctctcatattatcaccaaactgcttagccagaagccccccgggaacaagagcaggggacgctacagtgcagtacaagcgcagacctccccaattggctccagcaaaaacaagattggaataagcatattgggaaccgccagtaatatcatcgaagttgctggaaatataatcaggcagagtttcttgtaaaaattgaataaaagaaaaatttgccaaaaaaacattcaaaacctctgggatgcaaatgcaataggttaccgcgctgcgctccaacattgttagttttgaattagtctgcaaaaataaaaaaaaaaacaagcgtcatatcatagtagcctgacgaacagatggataaatcagtctttccatcacaagacaagccacagggtctccagctcgaccctcgtaaaacctgtcatcatgattaaacaacagcaccgaaagttcctcgcggtgaccagcatgaataattcttgatgaagcatacaatccagacatgttagcatcagttaacgagaaaaaacagccaacatagcctttgggtataattatgcttaatcgtaagtatagcaaagccacccctcgcggatacaaagtaaaaggcacaggagaataaaaaatataattatttctctgctgctgttcaggcaacgtcgcccccggtccctctaaatacacatacaaagcctcatcagccatggcttaccagacaaagtacagcgggcacacaaagcacaagctctaaagtgactctccaacctctccacaatatatatatacacaagccctaaactgacgtaatgggagtaaagtgtaaaaaatcccgccaaacccaacacacaccccgaaactgcgtcaccagggaaaagtacagtttcacttccgcaatcccaacaggcgtaacttcctctttctcacggtacgtgatatcccactaacttgcaacgtcattttcccacggtcgcaccgccccttttagccgttaaccccacagccaatcaccacacgatccacactttttaaaatcacctcatttacatattggcaccattccatctataaggtatattatatagataga

SEQ ID NO: 106 - DNA, 35341 bp, Artificial Sequence
  Genome sequence of NG-763 virus
tctatctatataatataccttatagatggaatggtgccaatatgtaaatgaggtgattttaaaaagtgtggatcgtgtggtgattggctgtggggttaacggctaaaaggggcggtgcgaccgtgggaaaatgacgttttgtgggggtggagtttttttgcaagttgtcgcgggaaatgtgacgcataaaaaggcttttttctcacggaactacttagttttcccacggtatttaacaggaaatgaggtagttttgaccggatgcaagtgaaaattgttgattttcgcgcgaaaactgaatgaggaagtgtttttctgaataatgtggtatttatggcagggtggagtatttgttcagggccaggtagactttgacccattacgtggaggtttcgattaccgtgttttttacctgaatttccgcgtaccgtgtcaaagtcttctgtttttacgtaggtgtcagctgatcgctagggtatttatacctcagggtttgtgtcaagaggccactcttgagtgccagcgagaagagttttctcctctgcgccggcagtttaataataaaaaaatgagagatttgcgatttctgcctcaggaaataatctctgctgagactggaaatgaaatattggagcttgtggtgcacgccctgatgggagacgatccggagccacctgtgcagctttttgagcctcctacgcttcaggaactgtatgatttagaggtagagggatcggaggattctaatgaggaagctgtaaatggcttttttaccgattctatgcttttagctgctaatgaagggttagaattagatccgcctttggacacttttgatactccaggggtaattgtggaaagcggtacaggtgtaagaaaattacctgatttgagttccgtggactgtgatttgcactgctatgaagacgggtttcctccgagtgatgaggaggaccatgaaaaggagcagtccatgcagactgcagcgggtgagggagtgaaggctgccaatgttggttttcagttggattgcccggagcttcctggacatggctgtaagtcttgtgaatttcacaggaaaaatactggagtaaaggaactgttatgttcgctttgttatatgagaacgcactgccactttatttacagtaagtgtgtttaagttaaaatttaaaggaatatgctgtttttcacatgtatattgagtgtgagttttgtgcttcttattataggtcctgtgtctgatgctgatgaatcaccatctcctgattctactacctcacctcctgagattcaagcacctgttcctgtggacgtgcgcaagcccattcctgtgaagcttaagcctgggaaacgtccagcagtggaaaaacttgaggacttgttacagggtggggacggacctttggacttgagtacacggaaacgtccaagacaataagtgttccatatccgtgtttacttaaggtgacgtcaatatttgtgtgacagtgcaatgtaataaaaatatgttaactgttcactggtttttattgctttttgggcggggactcaggtatataagtagaagcagacctgtgtggttagctcataggagctggctttcatccatggaggtttgggccattttggaagaccttaggaagactaggcaactgttagagaacgcttcggacggagtctccggtttttggagattctggttcgctagtgaattagctagggtagtttttaggataaaacaggactataaacaagaatttgaaaagttgttggtagattgcccaggactttttgaagctcttaatttgggccatcaggttcactttaaagaaaaagttttatcagttttagacttttcaaccccaggtagaactgctgctgctgtggcttttcttacttttatattagataaatggatcccgcagactcatttcagcaggggatacgttttggatttcatagccacagcattgtggagaacatggaaggttcgcaagatgaggacaatcttaggttactggccagtgcagcctttgggtgtagcgggaatcctgaggcatccaccggtcatgccagcggttctggaggaggaacagcaagaggacaacccgagagccggcctggaccctccagtggaggaggcggagtagctgacttgtctcctgaactgcaacgggtgcttactggatctacgtccactggacgggataggggcgttaagagggagagggcatctagtggtactgatgctagatctgagttggctttaagtttaatgagtcgcagacgtcctgaaaccatttggtggcatgaggttcagaaagagggaagggatgaagtttctgtattgcaggagaaatattcactggaacaggtgaaaacatgttggttggagcctgaggatgattgggaggtggccattaaaaattatgccaagatagctttgaggcctgataaacagtataagattactagacggattaatatccggaatgcttgttacatatctggaaatggggctgaggtggtaatagatactcaagacaaggcagttattagatgctgcatgatggatatgtggcctggggtagtcggtatggaagcagtaacttttgtaaatgttaagtttaggggagatggttataatggaatagtgtttatggccaataccaaacttatattgcatggttgtagcttttttggtttcaacaatacctgtgtagatgcctggggacaggttagtgtacggggatgtagtttctatgcgtgttggattgccacagctggcagaaccaagagtcaattgtctctgaagaaatgcatatttcaaagatgtaacctgggcattctgaatgaaggcgaagcaagggtccgccactgcgcttctacagatactggatgttttattttgattaagggaaatgccagcgtaaagcataacatgatttgcggtgcttccgatgagaggccttatcaaatgctcacttgtgctggtgggcattgtaatatgctggctactgtgcatattgtttcccatcaacgcaaaaaatggcctgtttttgatcacaatgtgatgacgaagtgtaccatgcatgcaggtgggcgtagaggaatgtttatgccttaccagtgtaacatgaatcatgtgaaagtgttgttggaaccagatgccttttccagaatgagcctaacaggaatttttgacatgaacatgcaaatctggaagatcctgaggtatgatgatacgagatcgagggtacgcgcatgcgaatgcggaggcaagcatgccaggttccagccggtgtgtgtagatgtgactgaagatctcagaccggatcatttggttattgcccgcactggagcagagttcggatccagtggagaagaaactgactaaggtgagtattgggaaaactttggggtgggattttcagatggacagattgagtaaaaatttgttttttctgtcttgcagctgtcatgagtggaaacgcttcttttaaggggggagtcttcagcccttatctgacagggcgtctcccatcctgggcaggagttcgtcagaatgttatgggatctactgtggatggaagacccgtccaacccgccaattcttcaacgctgacctatgctactttaagttcttcacctttggacgcagctgcagctgccgccgccgcttctgttgccgctaacactgtgcttggaatgggttactatggaagcatcatggctaattccacttcctctaataacccttctaccctgactcaggacaagttacttgtccttttggcccagctggaggctttgacccaacgtctgggtgaactttctcagcaggtggtcgagttgcgagtacaaactgagtctgctgtcggcacggcaaagtctaaataaaaaaatcccagaatcaatgaataaataaacaagcttgttgttgatttaaaatcaagtgtttttatttcatttttcgcgcacggtatgccctagaccaccgatctctatcattgagaactcggtggattttttccaggatcctatagaggtgggattgaatgtttagatacatgggcattaggccgtctttggggtggagatagctccattgaagggattcatgctccggggtagtgttgtaaatcacccagtcataacaaggtcgcagtgcatggtgttgcacaatatcttttagaagtaggctgattgccacagataagcccttggtgtaggtgtttacaaaccggttgagctgggatgggtgcattcggggtgaaattatgtgcattttggattggatttttaagttggcaatattgccgccaagatcccgtcttgggttcatgttatgaaggaccaccaagacggtgtatccggtacatttaggaaatttatcgtgcagcttggatggaaaagcgtggaaaaatttggagacacccttgtgtcctccaagattttccatgcactcatccatgataatagcaatggggccgtgggcagcggcgcgggcaaacacgttccgtgggtctgacacatcatagttatgttcctgagttaaatcatcataagccattttaatgaatttggggcggagagtaccagattggggtatgaatgttccttcgggccccggagcatagttcccctcacagatttgcatttcccaagctttcagttccgagggtggaatcatgtccacctggggggctatgaaaaacaccgtttctggggcgggggtgattaattgtgatgatagcaaatttctgagcaattgagatttgccacatccggtggggccataaatgattccgattacgggttgcaggtggtagtttagggaacggcaactgccgtcttctcgaagcaagggggccacctcgttcatcatttcccttacatgcatattttcccgcaccaaatccattaggaggcgctctcctcctagtgatagaagttcttgtagtgaggaaaagtttttcagcggtttcagaccgtcagccatgggcattttggagagagtttgctgcaaaagttctagtctgttccacagttcagtgatgtgttctatggcatctcgatccagcagacctcctcgtttcgcgggtttggacggctcctggaatagggtatgagacgatgggcgtccagcgctgccagggttcggtccttccagggtctcagtgttcgagtcagggttgtttccgtcacagtgaaggggtgtgcgcctgcttgggcgcttgccagggtgcgcttcagactcatcctgctggtcgaaaacttctgtcgcttggcgccctgtatgtcggccaagtagcagtttaccatgagttcgtagttgagcgcctcggctgcgtggcctttggcgcggagcttacctttggaagttttcttgcataccgggcagtataggcatttcagcgcatacaacttgggcgcaaggaaaacggattctggggagtatgcatctgcgccgcaggaggcgcaaacagtttcacattccaccagccaggttaaatccggttcattggggtcaaaaacaagttttccgccatattttttgatgcgtttcttacctttggtctccatgagttcgtgtcctcgttgagtgacaaacaggctgtccgtgtccccgtagactgattttacaggcctcttctccagtggagtgcctcggtcttcttcgtacaggaactctgaccactctgatacaaaggcgcgcgtccaggccagcacaaaggaggctatgtgggaggggtagcgatcgttgtcaaccagggggtccaccttttccaaagtatgcaaacacatgtcaccctcttcaacatccaggaatgtgattggcttgtaggtgtatttcacgtgacctggggtccccgctgggggggtataaaagggggcggttctttgctcttcctcactgtcttccggatcgctgtccaggaacgtcagctgttggggtaggtattccctctcgaaggcgggcatgacctctgcactcaggttgtcagtttctaagaacgaggaggatttgatattgacagtgccggttgagatgcctttcatgaggttttcgtccatctggtcagaaaacacaatttttttattgtcaagtttggtggcaaatgatccatacagggcgttggataaaagtttggcaatggatcgcatggtttggttcttttccttgtccgcgcgctctttggcggcgatgttgagttggacatactcgcgtgccaggcacttccattcggggaagatagttgttaattcatctggcacgattctcacttgccaccctcgattatgcaaggtaattaaatccacactggtggccacctcgcctcgaaggggttcattggtccaacagagcctacctcctttcctagaacagaaagggggaagtgggtctagcataagttcatcgggagggtctgcatccatggtaaagattcccggaagtaaatccttatcaaaatagctgatgggagtggggtcatctaaggccatttgccattctcgagctgccagtgcgcgctcatatgggttaaggggactgccccatggcatgggatgggtgagtgcagaggcatacatgccacagatgtcatagacgtagatgggatcctcaaagatgcctatgtaggttggatagcatcgcccccctctgatacttgctcgcacatagtcatatagttcatgtgatggcgctagcagccccggacccaagttggtgcgattgggtttttctgttctgtagacgatctggcgaaagatggcgtgagaattggaagagatggtgggtctttgaaaaatgttgaaatgggcatgaggtagacctacagagtctctgacaaagtgggcataagattcttgaagcttggttaccagttcggcggtgacaagtacgtctagggcgcagtagtcaagtgtttcttgaatgatgtcataacctggttggtttttcttttcccacagttcgcggttgagaaggtattcttcgcgatccttccagtactcttctagcggaaacccgtctttgtctgcacggtaagatcctagcatgtagaactgattaactgccttgtaagggcagcagcccttctctacgggtagagagtatgcttgagcagcttttcgtagcgaagcgtgagtaagggcaaaggtgtctctgaccatgactttgaggaattggtatttgaagtcgatgtcgtcacaggctccctgttcccagagttggaagtctacccgtttcttgtaggcggggttgggcaaagcgaaagtaacatcattgaagagaatcttgccggccctgggcatgaaattgcgagtgatgcgaaaaggctgtggtacttccgctcggttattgataacctgggcagctaggacgatctcgtcgaaaccgttgatgttgtgtcctacgatgtataattctatgaaacgcggcgtgcctctgacgtgaggtagcttactgagctcatcaaaggttaggtctgtggggtcagataaggcgtagtgttcgagagcccattcgtgcaggtgaggattcgctttaaggaaggaggaccagaggtccactgccagtgctgtttgtaactggtcccggtactgacgaaaatgccgtccgactgccattttttctggggtgacgcaatagaaggtttgggggtcctgccgccagcgatcccacttgagttttatggcgaggtcataggcgatgttgacgagccgctggtctccagagagtttcatgaccagcatgaaggggattagctgcttgccaaaggaccccatccaggtgtaggtttccacatcgtaggtgagaaagagcctttctgtgcgaggatgagagccaatcgggaagaactggatctcctgccaccagttggaggaatggctgttgatgtgatggaagtagaactccctgcgacgcgccgagcattcatgcttgtgcttgtacagacggccgcagtagtcgcagcgttgcacgggttgtatctcgtgaatgagttgtacctggcttcccttgacgagaaatttcagtgggaagccgaggcctggcgattgtatctcgtgctttactatgttgtctgcatcggcctgttcatcttctgtctcgatggtggtcatgctgacgagccctcgcgggaggcaagtccagacctcggcgcggcaggggcggagctcgaggacgagagcgcgcaggctggagctgtccagggtcctgagacgctgcggactcaggttagtaggcagtgtcaggagattaacttgcatgatcttttggagggcgtgcgggaggttcagatagtacttgatctcaacgggtccgttggtggagatgtcgatggcttgcagggttccgtgtcccttgggcgctaccaccgtgcccttgtttttcattttggacggcggtggctctgttgcttcttgcatgtttagaagcggtgtcgagggcgcgcaccgggcggcaggggcggctcgggacccggcggcatggctggcagtggtacgtcggcgccgcgcgcgggtaggttctggtactgcgccctgagaagactcgcatgcgcgacgacgcggcggttgacatcctggatctgacgcctctgggtgaaagctaccggccccgtgagcttgaacctgaaagagagttcaacagaatcaatctcggtatcgttgacggcggcttgcctaaggatttcttgcacgtcaccagagttgtcctggtaggcgatctccgccatgaactgctcgatctcttcctcttgaagatctccgcggcccgctctctcgacggtggccgcgaggtcgttggagatgcgcccaatgagttgagagaatgcattcatgcccgcctcgttccagacgcggctgtagaccacggcccccacgggatctctcgcgcgcatgaccacctgggcgaggttgagctccacgtggcgggtgaagaccgcatagttgcataggcgctggaaaaggtagttgagtgtggtggcgatgtgctcggtgacgaagaaatacatgatccatcgtctcagcggcatctcgctgacatcgcccagagcttccaagcgctccatggcctcgtagaagtccacggcaaaattaaaaaactgggagtttcgcgcggacacggtcaactcctcttccagaagacggataagttcggcgatggtggtgcgcacctcgcgctcgaaagcccctgggatttcttcctcaatctcttcttcttccactaacatctcttcctcttcaggtggggctgcaggaggagggggaacgcggcgacgccggcggcgcacgggcagacggtcgatgaatctttcaatgacctctccgcggcggcggcgcatggtttcagtgacggcgcggccgttctcgcgcggtcgcagagtaaaaacaccgccgcgcatctccttaaagtggtgactgggaggttctccgtttgggagggagagggcgctgattatacattttattaattggcccgtagggactgcacgcagagatctgatcgtgtcaagatccacgggatctgaaaacctttcgacgaaagcgtctaaccagtcacagtcacaaggtaggctgagtacggcttcttgtgggcgggggtggttatgtgttcggtctgggtcttctgtttcttcttcatctcgggaaggtgagacgatgctgctggtgatgaaattaaagtaggcagttctaagacggcggatggtggcgaggagcaccaggtctttgggtccggcttgctggatacgcaggcgattggccattccccaagcattatcctgacatctagcaagatctttgtagtagtcttgcatgagccgttctacgggcacttcttcctcacccgttctgccatgcatacgtgtgagtccaaatccgcgcattggttgtaccagtgccaagtcagctacgactctttcggcgaggatggcttgctgtacttgggtaagggtggcttgaaagtcatcaaaatccacaaagcggtggtaagctcctgtattaatggtgtaagcacagttggccatgactgaccagttaactgtctggtgaccagggcgcacgagctcggtgtatttaaggcgcgaataggcgcgggtgtcaaagatgtaatcgttgcaggtgcgcaccagatactggtaccctataagaaaatgcggcggtggttggcggtagagaggccatcgttctgtagctggagcgccaggggcgaggtcttccaacataaggcggtgatagccgtagatgtacctggacatccaggtgattcctgcggcggtagtagaagcccgaggaaactcgcgtacgcggttccaaatgttgcgtagcggcatgaagtagttcattgtaggcacggtttgaccagtgaggcgcgcgcagtcattgatgctctatagacacggagaaaatgaaagcgttcagcgactcgactccgtagcctggaggaacgtgaacgggttgggtcgcggtgtaccccggttcgagacttgtactcgagccggccggagccgcggctaacgtggtattggcactcccgtctcgacccagcctacaaaaatccaggatacggaatcgagtcgttttgctggtttccgaatggcagggaagtgagtcctattttttttttttgccgctcagatgcatcccgtgctgcgacagatgcgcccccaacaacagcccccctcgcagcagcagcagcagcaatcacaaaaggctgtccctgcaactactgcaactgccgccgtgagcggtgcgggacagcccgcctatgatctggacttggaagagggcgaaggactggcacgtctaggtgcgccttcacccgagcggcatccgcgagttcaactgaaaaaagattctcgcgaggcgtatgtgccccaacagaacctatttagagacagaagcggcgaggagccggaggagatgcgagcttcccgctttaacgcgggtcgtgagctgcgtcacggtttggaccgaagacgagtgttgcgggacgaggatttcgaagttgatgaaatgacagggatcagtcctgccagggcacacgtggctgcagccaaccttgtatcggcttacgagcagacagtaaaggaagagcgtaacttccaaaagtcttttaataatcatgtgcgaaccctgattgcccgcgaagaagttacccttggtttgatgcatttgtgggatttgatggaagctatcattcagaaccctactagcaaacctctgaccgcccagctgtttctggtggtgcaacacagcagagacaatgaggctttcagagaggcgctgctgaacatcaccgaacccgaggggagatggttgtatgatcttatcaacattctacagagtatcatagtgcaggagcggagcctgggcctggccgagaaggtggctgccatcaattactcggttttgagcttgggaaaatattacgctcgcaaaatctacaagactccatacgttcccatagacaaggaggtgaagatagatgggttctacatgcgcatgacgctcaaggtcttgaccctgagcgatgatcttggggtgtatcgcaatgacagaatgcatcgcgcggttagcgccagcaggaggcgcgagttaagcgacagggaactgatgcacagtttgcaaagagctctgactggagctggaaccgagggtgagaattacttcgacatgggagctgacttgcagtggcagcctagtcgcagggctctgagcgccgcgacggcaggatgtgagcttccttacatagaagaggcggatgaaggcgaggaggaagagggcgagtacttggaagactgatggcacaacccgtgttttttgctagatggaacagcaagcaccggatcccgcaatgcgggcggcgctgcagagccagccgtccggcattaactcctcggacgattggacccaggccatgcaacgtatcatggcgttgacgactcgcaaccccgaagcctttagacagcaaccccaggccaaccgtctatcggccatcatggaagctgtagtgccttcccgctctaatcccactcatgagaaggtcctggccatcgtgaacgcgttggtggagaacaaagctattcgtccagatgaggccggactggtatacaacgctctcttagaacgcgtggctcgctacaacagtagcaatgtgcaaaccaatttggaccgtatgataacagatgtacgcgaagccgtgtctcagcgcgaaaggttccagcgtgatgccaacctgggttcgctggtggcgttaaatgctttcttgagtactcagcctgctaatgtgccgcgtggtcaacaggattatactaactttttaagtgctttgagactgatggtatcagaagtacctcagagcgaagtgtatcagtccggtcctgattacttctttcagactagcagacagggcttgcagacggtaaatctgagccaagcttttaaaaaccttaaaggtttgtggggagtgcatgccccggtaggagaaagagcaaccgtgtctagcttgttaactccgaactcccgcctattattactgttggtagctcctttcaccgacagcggtagcatcgaccgtaattcctatttgggttacctactaaacctgtatcgcgaagccatagggcaaagtcaggtggacgagcagacctatcaagaaattacccaagtcagtcgcgctttgggacaggaagacactggcagtttggaagccactctgaacttcttgcttaccaatcggtctcaaaagatccctcctcaatatgctcttactgcggaggaggagaggatccttagatatgtgcagcagagcgtgggattgtttctgatgcaagagggggcaactccgactgcagcactggacatgacagcgcgaaatatggagcccagcatgtatgccagtaaccgacctttcattaacaaactgctggactacttgcacagagctgccgctatgaactctgattatttcaccaatgccatcttaaacccgcactggctgcccccacctggtttctacacgggcgaatatgacatgcccgaccctaatgacggatttctgtgggacgacgtggacagcgatgttttttcacctctttctgatcatcgcacgtggaaaaaggaaggcggcgatagaatgcattcttctgcatcgctgtccggggtcatgggtgctaccgcggctgagcccgagtctgcaagtccttttcctagtctacccttttctctacacagtgtacgtagcagcgaagtgggtagaataagtcgcccgagtttaatgggcgaagaggagtatctaaacgattccttgctcagaccggcaagagaaaaaaatttcccaaacaatggaatagaaagtttggtggataaaatgagtagatggaagacttatgctcaggatcacagagacgagcctgggatcatggggattacaagtagagcgagccgtagacgccagcgccatgacagacagaggggtcttgtgtgggacgatgaggattcggccgatgatagcagcgtgctggacttgggtgggagaggaaggggcaacccgtttgctcatttgcgccctcgcttgggtggtatgttgtaaaaaaaaataaaaaaaaaactcaccaaggccatggcgacgagcgtacgttcgttcttctttattatctgtgtctagtataatgaggcgagtcgtgctaggcggagcggtggtgtatccggagggtcctcctccttcgtacgagagcgtgatgcagcagcagcaggcgacggcggtgatgcaatccccactggaggctccctttgtgcctccgcgatacctggcacctacggagggcagaaacagcattcgttattcggaactggcacctcagtacgataccaccaggttgtatctggtggacaacaagtcggcggacattgcttctctgaactatcagaatgaccacagcaacttcttgaccacggtggtgcaaaacaatgactttacccctacggaagccagcacccagaccattaactttgatgaacgatcgcggtggggcggtcagctaaagaccatcatgcatactaacatgccaaacgtgaacgagtatatgtttagtaacaagttcaaagcgcgtgtgatggtgtccagaaaacctcccgacggtgctgcagttggggatacttatgatcacaagcaggatattttgaaatatgagtggttcgagtttactttgccagaaggcaacttttcagttactatgactattgatttgatgaacaatgccatcatagataattacttgaaagtgggtagacagaatggagtgcttgaaagtgacattggtgttaagttcgacaccaggaacttcaagctgggatgggatcccgaaaccaagttgatcatgcctggagtgtatacgtatgaagccttccatcctgacattgtcttactgcctggctgcggagtggattttaccgagagtcgtttgagcaaccttcttggtatcagaaaaaaacagccatttcaagagggttttaagattttgtatgaagatttagaaggtggtaatattccggccctcttggatgtagatgcctatgagaacagtaagaaagaacaaaaagccaaaatagaagctgctacagctgctgcagaagctaaggcaaacatagttgccagcgactctacaagggttgctaacgctggagaggtcagaggagacaattttgcgccaacacctgttccgactgcagaatcattattggccgatgtgtctgaaggaacggacgtgaaactcactattcaacctgtagaaaaagatagtaagaatagaagctataatgtgttggaagacaaaatcaacacagcctatcgcagttggtatctttcgtacaattatggcgatcccgaaaaaggagtgcgttcctggacattgctcaccacctcagatgtcacctgcggagcagagcaggtctactggtcgcttccagacatgatgaaggatcctgtcactttccgctccactagacaagtcagtaactaccctgtggtgggtgcagagcttatgcccgtcttctcaaagagcttctacaacgaacaagctgtgtactcccagcagctccgccagtccacctcgcttacgcacgtcttcaaccgctttcctgagaaccagattttaatccgtccgccggcgcccaccattaccaccgtcagtgaaaacgttcctgctctcacagatcacgggaccctgccgttgcgcagcagtatccggggagtccaacgtgtgaccgttactgacgccagacgccgcacctgtccctacgtgtacaaggcactgggcatagtcgcaccgcgcgtcctttcaagccgcactttctaaaaaaaaaaaaaatgtccattcttatctcgcccagtaataacaccggttggggtctgcgcgctccaagcaagatgtacggaggcgcacgcaaacgttctacccaacatcctgtccgtgttcgcggacattttcgcgctccatggggcgccctcaagggccgcactcgcgttcgaaccaccgtcgatgatgtaatcgatcaggtggttgccgacgcccgtaattatactcctactgcgcctacatctactgtggatgcagttattgacagtgtagtggctgacgctcgcaactatgctcgacgtaagagccggcgaaggcgcattgccagacgccaccgagctaccactgccatgcgagccgcaagagctctgctacgaagagctagacgcgtggggcgaagagccatgcttagggcggccagacgtgcagcttcgggcgccagcgccggcaggtcccgcaggcaagcagccgctgtcgcagcggcgactattgccgacatggcccaatcgcgaagaggcaatgtatactgggtgcgtgacgctgccaccggtcaacgtgtacccgtgcgcacccgtccccctcgcacttagaagatactgagcagtctccgatgttgtgtcccagcggcgaggatgtccaagcgcaaatacaaggaagaaatgctgcaggttatcgcacctgaagtctacggccaaccgttgaaggatgaaaaaaaaccccgcaaaatcaagcgggttaaaaaggacaaaaaagaagaggaagatggcgatgatgggctggcggagtttgtgcgcgagtttgccccacggcgacgcgtgcaatggcgtgggcgcaaagttcgacatgtgttgagacctggaacttcggtggtctttacacccggcgagcgttcaagcgctacttttaagcgttcctatgatgaggtgtacggggatgatgatattcttgagcaggcggctgaccgattaggcgagtttgcttatggcaagcgtagtagaataacttccaaggatgagacagtgtcgatacccttggatcatggaaatcccacccctagtcttaaaccggtcactttgcagcaagtgttacccgtaactccgcgaacaggtgttaaacgcgaaggtgaagatttgtatcccactatgcaactgatggtacccaaacgccagaagttggaggacgttttggagaaagtaaaagtggatccagatattcaacctgaggttaaagtgagacccattaagcaggtagcgcctggtctgggggtacaaactgtagacattaagattcccactgaaagtatggaagtgcaaactgaacccgcaaagcctactgccacctccactgaagtgcaaacggatccatggatgcccatgcctattacaactgacgccgccggtcccactcgaagatcccgacgaaagtacggtccagcaagtctgttgatgcccaattatgttgtacacccatctattattcctactcctggttaccgaggcactcgctactatcgcagccgaaacagtacctcccgccgtcgccgcaagacacctgcaaatcgcagtcgtcgccgtagacgcacaagcaaaccgactcccggcgccctggtgcggcaagtgtaccgcaatggtagtgcggaacctttgacactgccgcgtgcgcgttaccatccgagtatcatcacttaatcaatgttgccgctgcctccttgcagatatggccctcacttgtcgccttcgcgttcccatcactggttaccgaggaagaaactcgcgccgtagaagagggatgttgggacgcggaatgcgacgctacaggcgacggcgtgctatccgcaagcaattgcggggtggttttttaccagccttaattccaattatcgctgctgcaattggcgcgataccaggcatagcttccgtggcggttcaggcctcgcaacgacattgacattggaaaaaaacgtataaataaaaaaaaaaaaatacaatggactctgacactcctggtcctgtgactatgttttcttagagatggaagacatcaatttttcatccttggctccgcgacacggcacgaagccgtacatgggcacctggagcgacatcggcacgagccaactgaacgggggcgccttcaattggagcagtatctggagcgggcttaaaaattttggctcaaccataaaaacatacgggaacaaagcttggaacagcagtacaggacaggcgcttagaaataaacttaaagaccagaacttccaacaaaaagtagtcgatgggatagcttccggcatcaatggagtggtagatttggctaaccaggctgtgcagaaaaagataaacagtcgtttggacccgccgccagcaaccccaggtgaaatgcaagtggaggaagaaattcctccgccagaaaaacgaggcgacaagcgtccgcgtcccgatttggaagagacgctggtgacgcgcgtagatgaaccgccttcttatgaggaagcaacgaagcttggaatgcccaccactagaccgatagccccaatggccaccggggtgatgaaaccttctcagttgcatcgacccgtcaccttggatttgccccctccccctgctgctactgctgtacccgcttctaagcctgtcgctgccccgaaaccagtcgccgtagccaggtcacgtcccgggggcgctcctcgtccaaatgcgcactggcaaaatactctgaacagcatcgtgggtctaggcgtgcaaagtgtaaaacgccgtcgctgcttttaattaaatatggagtagcgcttaacttgcctatctgtgtatatgtgtcattacacgccgtcacagcagcagaggaaaaaaggaagaggtcgtgcgtcgacgctgagttactttcaagatggccaccccatcgatgctgccccaatgggcatacatgcacatcgccggacaggatgcttcggagtacctgagtccgggtctggtgcagttcgcccgcgccacagacacctacttcaatctgggaaataagtttagaaatcccaccgtagcgccgacccacgatgtgaccaccgaccgtagccagcggctcatgttgcgcttcgtgcccgttgaccgggaggacaatacatactcttacaaagtgcggtacaccctggccgtgggcgacaacagagtgctggatatggccagcacgttctttgacattaggggtgtgttggacagaggtcccagtttcaaaccctattctggtacggcttacaactccctggctcctaaaggcgctccaaatacatctcagtggattgcagaaggtgtaaaaaatacaactggtgaggaacacgtaacagaagaggaaaccaatactactacttacacttttggcaatgctcctgtaaaagctgaagctgaaattacaaaagaaggactcccagtaggtttggaagtttcagatgaagaaagtaaaccgatttatgctgataaaacatatcagccagaacctcagctgggagatgaaacttggactgaccttgatggaaaaaccgaaaagtatggaggcagggctctcaaacccgatactaagatgaaaccatgctacgggtcctttgccaaacctactaatgtgaaaggcggtcaggcaaaacaaaaaacaacggagcagccaaatcagaaagtcgaatatgatatcgacatggagttttttgatgcggcatcgcagaaaacaaacttaagtcctaaaattgtcatgtatgcagaaaatgtaaatttggaaactccagacactcatgtagtgtacaaacctggaacagaagacacaagttccgaagctaatttgggacaacaatctatgcccaacagacccaactacattggcttcagagataactttattggacttatgtactataacagtactggtaacatgggggtgctggctggtcaagcgtctcagttaaatgcagtggttgacttgcaggacagaaacacagaactttcttaccaactcttgcttgactctctgggcgacagaaccagatactttagcatgtggaatcaggctgtggacagttatgatcctgatgtacgtgttattgaaaatcatggtgtggaagatgaacttcccaactactgttttccactggacggcataggtgttccaacaaccagttacaaatcaatagttccaaatggagacaatgcgcctaattggaaggaacctgaagtaaatggaacaagtgagatcggacagggtaatttgtttgccatggaaattaaccttcaagccaatctatggcgaagtttcctttattccaatgtggctctatatctcccagactcgtacaaatacaccccgtccaatgtcactcttccagaaaacaaaaacacctacgactacatgaacgggcgggtggtgccgccatctctagtagacacctatgtgaacattggtgccaggtggtctctggatgccatggacaatgtcaacccattcaaccaccaccgtaacgctggcttgcgttaccgatccatgcttctgggtaacggacgttatgtgcctttccacatacaagtgcctcaaaaattcttcgctgttaaaaacctgctgcttctcccaggctcctacacttatgagtggaactttaggaaggatgtgaacatggttctacagagttccctcggtaacgacctgcgggtagatggcgccagcatcagtttcacgagcatcaacctctatgctacttttttccccatggctcacaacaccgcttccacccttgaagccatgctgcggaatgacaccaatgatcagtcattcaacgactacctatctgcagctaacatgctctaccccattcctgccaatgcaaccaatattcccatttccattccttctcgcaactgggcggctttcagaggctggtcatttaccagactgaaaaccaaagaaactccctctttggggtctggatttgacccctactttgtctattctggttctattccctacctggatggtaccttctacctgaaccacacttttaagaaggtttccatcatgtttgactcttcagtgagctggcctggaaatgacaggttactatctcctaacgaatttgaaataaagcgcactgtggatggcgaaggctacaacgtagcccaatgcaacatgaccaaagactggttcttggtacagatgctcgccaactacaacatcggctatcagggcttctacattccagaaggatacaaagatcgcatgtattcatttttcagaaacttccagcccatgagcaggcaggtggttgatgaggtcaattacaaagacttcaaggccgtcgccataccctaccaacacaacaactctggctttgtgggttacatggctccgaccatgcgccaaggtcaaccctatcccgctaactatccctatccactcattggaacaactgccgtaaatagtgttacgcagaaaaagttcttgtgtgacagaaccatgtggcgcataccgttctcgagcaacttcatgtctatgggggcccttacagacttgggacagaatatgctctatgccaactcagctcatgctctggacatgacctttgaggtggatcccatggatgagcccaccctgctttatcttctcttcgaagttttcgacgtggtcagagtgcatcagccacaccgcggcatcatcgaggcagtctacctgcgtacaccgttctcggccggtaacgctaccacgtaagaagcttcttgcttcttgcaaatagcagctgcaaccatggcctgcggatcccaaaacggctccagcgagcaagagctcagagccattgtccaagacctgggttgcggaccctattttttgggaacctacgataagcgcttcccggggttcatggcccccgataagctcgcctgtgccattgtaaatacggccggacgtgagacggggggagagcactggttggctttcggttggaacccacgttctaacacctgctacctttttgatccttttggattctcggatgatcgtctcaaacagatttaccagtttgaatatgagggtctcctgcgccgcagcgctcttgctaccaaggaccgctgtattacgctggaaaaatctacccagaccgtgcagggtccccgttctgccgcctgcggacttttctgctgcatgttccttcacgcctttgtgcactggcctgaccgtcccatggacggaaaccccaccatgaaattgctaactggagtgccaaacaacatgcttcattctcctaaagtccagcccaccctgtgtgacaatcaaaaagcactctaccattttcttaatacccattcgccttattttcgctcccatcgtacacacatcgaaagggccactgcgttcgaccgtatggatgttcaataatgactcatgtaaacaacgtgttcaataaacatcactttatttttttacatgtatcaaggctctgcattacttatttatttacaagtcgaatgggttctgacgagaatcagaatgacccgcaggcagtgatacgttgcggaactgatacttgggttgccacttgaattcgggaatcaccaacttgggaaccggtatatcgggcaggatgtcactccacagctttctggtcagctgcaaagctccaagcaggtcaggagccgaaatcttgaaatcacaattaggaccagtgctttgagcgcgagagttgcggtacaccggattgcagcactgaaacaccatcagcgacggatgtctcacgcttgccagcacggtgggatctgcaatcatgcccacatccagatcttcagcattggcaatgctgaacggggtcatcttgcaggtctgcctacccatggcgggcacccaattaggcttgtggttgcaatcgcagtgcagggggatcagtatcatcttggcctgatcctgtctgattcctggatacacggctctcatgaaagcatcatattgcttgaaagcctgctgggctttactaccctcggtataaaacatcccgcaggacctgctcgaaaactggttagctgcacagccggcatcattcacacagcagcgggcgtcattgttagctatttgcaccacacttctgccccagcggttttgggtgattttggttcgctcgggattctcctttaaggctcgttgtccgttctcgctggccacatccatctcgataatctgctccttctgaatcataatattgccatgcaggcacttcagcttgccctcataatcattgcagccatgaggccacaacgcacagcctgtacattcccaattatggtgggcgatctgagaaaaagaatgtatcattccctgcagaaatcttcccatcatcgtgctcagtgtcttgtgactagtgaaagttaactggatgcctcggtgctcctcgtttacgtactggtgacagatgcgcttgtattgttcgtgttgctcaggcattagtttaaaagaggttctaagttcgttatccagcctgtacttctccatcagcagacacatcacttccatgcctttctcccaagcagacaccaggggcaagctaatcggattcttaacagtgcaggcagcagctcctttagccagagggtcatctttagcgatcttctcaatgcttcttttgccatccttctcaacgatgcgcacgggcgggtagctgaaacccactgctacaagttgcgcctcttctctttcttcttcgctgtcttgactgatgtcttgcatggggatatgtttggtcttccttggcttctttttggggggtatcggaggaggaggactgtcgctccgttccggagacagggaggattgtgacgtttcgctcaccattaccaactgactgtcggtagaagaacctgaccccacacggcgacaggtgtttctcttcgggggcagaggtggaggcgattgcgaagggctgcggtccgacctggaaggcggatgactggcagaaccccttccgcgttcgggggtgtgctccctgtggcggtcgcttaactgatttccttcgcggctggccattgtgttctcctaggcagagaaacaacagacatggaaactcagccattgctgtcaacatcgccacgagtgccatcacatctcgtcctcagcgacgaggaaaaggagcagagcttaagcattccaccgcccagtcctgccaccacctctaccctagaagataaggaggtcgacgcatctcatgacatgcagaataaaaaagcgaaagagtctgagacagacatcgagcaagacccgggctatgtgacaccggtggaacacgaggaagagttgaaacgctttctagagagagaggatgaaaactgcccaaaacaacgagcagataactatcaccaagatgctggaaatagggatcagaacaccgactacctcatagggcttgacggggaagacgcgctccttaaacatctagcaagacagtcgctcatagtcaaggatgcattattggacagaactgaagtgcccatcagtgtggaagagctcagccgcgcctacgagcttaacctcttttcacctcgtactccccccaaacgtcagccaaacggcacctgcgagccaaatcctcgcttaaacttttatccagcttttgctgtgccagaagtactggctacctatcacatcttttttaaaaatcaaaaaattccagtctcctgccgcgctaatcgcacccgcgccgatgccctactcaatctgggacctggttcacgcttacctgatatagcttccttggaagaggttccaaagatcttcgagggtctgggcaataatgagactcgggccgcaaatgctctgcaaaagggagaaaatggcatggatgagcatcacagcgttctggtggaattggaaggcgataatgccagactcgcagtactcaagcgaagcatcgaggtcacacacttcgcatatcccgctgtcaacctgccccctaaagtcatgacggcggtcatggaccagttactcattaagcgcgcaagtcccctttcagaagacatgcatgacccagatgcctgtgatgagggtaaaccagtggtcagtgatgagcagctaacccgatggctgggcaccgactctcccagggatttggaagagcgtcgcaagcttatgatggccgtggtgctggttaccgtagaactagagtgtctccgacgtttctttaccgattcagaaaccttgcgcaaactcgaagagaatctgcactacacttttagacacggctttgtgcggcaggcatgcaagatatctaacgtggaactcaccaacctggtttcctacatgggtattctgcatgagaatcgcctaggacaaagcgtgctgcacagcaccctgaagggggaagcccgccgtgattacatccgcgattgtgtctatctgtacctgtgccacacgtggcaaaccggcatgggtgtatggcagcaatgtttagaagaacagaacttgaaagagcttgacaagctcttacagaaatctcttaaggttctgtggacagggttcgacgagcgcaccgtcgcttccgacctggcagacctcatcttcccagagcgtctcagggttactttgcgaaacggattgcctgactttatgagccagagcatgcttaacaattttcgctctttcatcctggaacgctccggtatcctgcccgccacctgctgcgcactgccctccgactttgtgcctctcacctaccgcgagtgccccccgccgctatggagtcactgctacctgttccgtctggccaactatctctcctaccactcggatgtgatcgaggatgtgagcggagacggcttgctggagtgtcactgccgctgcaatctgtgcacgccccaccggtccctagcttgcaacccccagttgatgagcgaaacccagataataggcacctttgaattgcaaggccccagcagccaaggcgatgggtcttctcctgggcaaagtttaaaactgaccccgggactgtggacctccgcctacttgcgcaagtttgctccggaagattaccacccctatgaaatcaagttctatgaggaccaatcacagcctccaaaggccgaactttcggcctgcgtcatcacccagggggcaattctggcccaattgcaagccatccaaaaatcccgccaagaatttctactgaaaaagggtaagggggtctaccttgacccccagaccggcgaggaactcaacacaaggttccctcaggatgtcccaacgacgagaaaacaagaagttgaaggtgcagccgccgcccccagaagatatggaggaagattgggacagtcaggcagaggaggcggaggaggacagtctggaggacagtctggaggaagacagtttggaggaggaaaacgaggaggcagaggaggtggaagaagtaaccgccgacaaacagttatcctcggctgcggagacaagcaacagcgctaccatctccgctccgagtcgaggaacccggcggcgtcccagcagtagatgggacgagaccggacgcttcccgaacccaaccagcgcttccaagaccggtaagaaggatcggcagggatacaagtcctggcgggggcataagaatgccatcatctcctgcttgcatgagtgcgggggcaacatatccttcacgcggcgctacttgctattccaccatggggtgaactttccgcgcaatgttttgcattactaccgtcacctccacagcccctactatagccagcaaatcccggcagtctcgacagataaagacagcggcggcgacctccaacagaaaaccagcagcggcagttagaaaatacacaacaagtgcagcaacaggaggattaaagattacagccaacgagccagcgcaaacccgagagttaagaaatcggatctttccaaccctgtatgccatcttccagcagagtcggggtcaagagcaggaactgaaaataaaaaaccgatctctgcgttcgctcaccagaagttgtttgtatcacaagagcgaagatcaacttcagcgcactctcgaggacgccgaggctctcttcaacaagtactgcgcgctgactcttaaagagtaggcagcgaccgcgcttattcaaaaaaggcgggaattacatcatcctcgacatgagtaaagaaattcccacgccttacatgtggagttatcaaccccaaatgggattggcggcaggcgcctcccaggactactccacccgcatgaattggctcagcgccgggccttctatgatttctcgagttaatgatatacgcgcctaccgaaaccaaatacttttggaacagtcagctcttaccaccacgccccgccaacaccttaatcccagaaattggcccgccgccctagtgtaccaggaaagtcccgctcccaccactgtattacttcctcgagacgcccaggccgaagtccaaatgactaatgcaggtgcgcagttagctggcggctccaccctatgtcgtcacaggcctcggcataatataaaacgcctgatgatcagaggccgaggtatccagctcaacgacgagtcggtgagctctccgcttggtctacgaccagacggaatctttcagattgccggctgcgggagatcttccttcacccctcgtcaggctgttctgactttggaaagttcgtcttcgcaaccccgctcgggcggaatcgggaccgttcaatttgtggaggagtttactccctctgtctacttcaaccccttctccggatctcctgggcattacccggacgagttcataccgaacttcgacgcgattagcgagtcagtggacggctacgattgatgtctggtgacgcggctgagctatctcggctgcgacatctagaccactgccgccgctttcgctgctttgcccgggaactcattgagttcatctacttcgaactccccaaggatcaccctcaaggtccggcccacggagtgcggatttctatcgaaggcaaaatagactctcgcctgcaacgaattttctcccagcggcccgtgctgatcgagcgagaccagggaaacaccacggtttccatctactgcatttgtaatcaccccggattgcatgaaagcctttgctgtcttatgtgtactgagtttaataaaaactgaattaagactctcctacggactgccgcttcttcaacccggattttacaaccagaagaacgaaacttttcctgtcgtccaggactctgttaacttcacctttcctactcacaaactagaagctcaacgactacaccgcttttccagaagcattttccctactaatactactttcaaaaccggaggtgagctccaaggtcttcctacagaaaacccttgggtggaagcgggccttgtagtgctaggaattcttgcgggtgggcttgtgattattctttgctacctatacacaccttgcttcactttcttagtggtgttgtggtattggtttaaaaaatggggcccatactagtcttgcttgttttactttcgcttttggaaccgggttctgccaattacgatccatgtctagacttcgacccagaaaactgcacacttacttttgcacccgacacaagccgcatctgtggagttcatcgcctctcttacgaacttggcccccaacgacaaaaatttacctgcatggtgggaatcaaccccatagttatcacccagcaaagtggagatactaagggttgcattcactgctcctgcgattccatcgagtgcacctacaccctgctgaagaccctatgcggcctaagagacctgctaccaatgaattaaaaaatgattaataaaaaatcacttacttgaaatcagcaataaggtctctgttgaaattttctcccagcagcacctcacttccctcttcccaactctggtattctaaaccccgttcagcggcatactttctccatactttaaaggggatgtcaaattttagctcctctcctgtacccacaatcttcatgtctttcttcccagatgaccaagagagtccggctcagtgactccttcaaccctgtctacccctatgaagatgaaagcacctcccaacacccctttataaacccagggtttatttccccaaatggcttcacacaaagcccaaacggagttcttactttaaaatgtttaaccccactaacaaccacaggcggatctctacagctaaaagtgggagggggacttacagtggatgacaccaacggttttttgaaagaaaacataagtgccaccacaccactcgttaagactggtcactctataggtttaccactaggagccggattgggaacgaatgaaaataaactttgtatcaaattaggacaaggacttacattcaattcaaacaacatttgcattgatgacaatattaacaccttatggacaggagtcaaccccaccgaagccaactgtcaaatcatgaactccagtgaatctaatgattgcaaattaattctaacactagttaaaactggagcactagtcactgcatttgtttatgttataggagtatctaacaattttaatatgctaactacacacagaaatataaattttactgcagagctgtttttcgattctactggtaatttactaactagactctcatccctcaaaactccacttaatcataaatcaggacaaaacatggctactggtgccattactaatgctaaaggtttcatgcccagcacgactgcctatcctttcaatgataattctagagaaaaagaaaactacatttacggaacttgttactacacagctagtgatcgcactgcttttcccattgacatatctgtcatgcttaaccgaagagcaataaatgacgagacatcatattgtattcgtataacttggtcctggaacacaggagatgccccagaggtgcaaacctctgctacaaccctagtcacctccccatttaccttttactacatcagagaagacgactgacaaataaagtttgcgatcgccaggcccaccatggactggacctggcgcatcctgttcttggtggcagctgctacgggagctcattccaactgggtgaatgtaataagtgatttgaaaaaaattgaagatcttattcaatctatgcatattgatgctactttatatacggaaagtgatgttcaccccagttgcaaagtaacagcaatgaagtgctttctcttggagttacaagttatttcacttgagtccggagatgcaagtattcatgatacagtagaaaatctgatcatcctagcaaacaacagtttgtcttctaatgggaatgtaacagaatctggatgcaaagaatgtgaggaactggaggaaaaaaatattaaagaatttttgcagagttttgtacatattgtccaaatgttcatcaacacttctggaagcggagagggcagaggaagtctgctaacatgcggtgacgtcgaggagaatcctggacctgccttgacctttgctttactggtggccctcctggtgctcagctgcaagtcaagctgctctgtgggctgtgatctgcctcaaacccacagcctgggtagcaggaggaccttgatgctcctggcacagatgaggagaatctctcttttctcctgcttgaaggacagacatgactttggatttccccaggaggagtttggcaaccagttccaaaaggctgaaaccatccctgtcctccatgagatgatccagcagatcttcaatctcttcagcacaaaggactcatctgctgcttgggatgagaccctcctagacaaattctacactgaactctaccagcagctgaatgacctggaagcctgtgtgatacagggggtgggggtgacagagactcccctgatgaaggaggactccattctggctgtgaggaaatacttccaaagaatcactctctatctgaaagagaagaaatacagcccttgtgcctgggaggttgtcagagcagaaatcatgagatctttttctttgtcaacaaacttgcaagaaagtttaagaagtaaggaaggaagcggacagtgtactaattatgctctcttgaaattggctggagatgttgagagcaaccctggacctatgtgtcaccagcagttggtcatctcttggttttccctggtttttctggcatctcccctcgtggccatatgggaactgaagaaagatgtttatgtcgtagaattggattggtatccggatgcccctggagaaatggtggtcctcacctgtgacacccctgaagaagatggtatcacctggaccttggaccagagcagtgaggtcttaggctctggcaaaaccctgaccatccaagtcaaagagtttggagatgctggccagtacacctgtcacaaaggaggcgaggttctaagccattcgctcctgctgcttcacaaaaaggaagatggaatttggtccactgatattttaaaggaccagaaagaacccaaaaataagacctttctaagatgcgaggccaagaattattctggacgtttcacctgctggtggctgacgacaatcagtactgatttgacattcagtgtcaaaagcagcagaggctcttctgacccccaaggggtgacgtgcggagctgctacactctctgcagagagagtcagaggggacaacaaggagtatgagtactcagtggagtgccaggaggacagtgcctgcccagctgctgaggagagtctgcccattgaggtcatggtggatgccgttcacaagctcaagtatgaaaactacaccagcagcttcttcatcagggacatcatcaaacctgacccacccaagaacttgcagctgaagccattaaagaattctcggcaggtggaggtcagctgggagtaccctgacacctggagtactccacattcctacttctccctgacattctgcgttcaggtccagggcaagagcaagagagaaaagaaagatagagtcttcacggacaagacctcagccacggtcatctgccgcaaaaatgccagcattagcgtgcgggcccaggaccgctactatagctcatcttggagcgaatgggcatctgtgccctgcagtggagggggcggcagcgggggaggcggcagcggcggcgggggatcgagaaacctccccgtggccactccagacccaggaatgttcccatgccttcaccactcccaaaacctgctgagggccgtcagcaacatgctccagaaggccagacaaactctagaattttacccttgcacttctgaagagattgatcatgaagatatcacaaaagataaaaccagcacagtggaggcctgtttaccattggaattaaccaagaatgagagttgcctaaattccagagagacctctttcataactaatgggagttgcctggcctccagaaagacctcttttatgatggccctgtgccttagtagtatttatgaagacttgaagatgtaccaggtggagttcaagaccatgaatgcaaagcttctgatggatcctaagaggcagatctttctagatcaaaacatgctggcagttattgatgagctgatgcaggccctgaatttcaacagtgagactgtgccacaaaaatcctcccttgaagaaccggatttttataaaactaaaatcaagctctgcatacttcttcatgctttcagaattcgggcagtgactattgatagagtgatgagctatctgaatgcttcctaagctagcttgactgactgagatacagcgtaccttcagctcacagacatgataagatacattgatgagtttggacaaaccacaactagaatgcagtgaaaaaaatgctttatttgtgaaatttgtgatgctattgctttatttgtaaccattataagctgcaataaacaagttaacaacaacaattgcattcattttatgtttcaggttcagggggaggtgtgggaggttttttaaagcaagtaaaacctctacaaatgtggtagtcgtcagctatcctgcaggaacttgtttatttgaaaatcaattcacaaaatccgagtagttattttgcctcccccttcccatttaacagaatacaccaatctctccccacgcacagctttaaacatttggataccattagatatagacatggttttagattccacattccaaacagtttcagagcgagccaatctggggtcagtgatagataaaaatccatcgggatagtcttttaaagcgctttcacagtccaactgctgcggatgcgactccggagtctggatcacggtcatctggaagaagaacgatgggaatcataatccgaaaacggtatcggacgattgtgtctcatcaaacccacaagcagccgctgtctgcgtcgctccgtgcgactgctgtttatgggatcagggtccacagtgtcctgaagcatgattttaatagcccttaacatcaactttctggtgcgatgcgcgcagcaacgcattctgatttcactcaaatctttgcagtaggtacaacacattattacaatattgtttaataaaccataattaaaagcgctccagccaaaactcatatctgatataatcgcccctgcatgaccatcataccaaagtttaatataaattaaatgacgttccctcaaaaacacactacccacatacatgatctcttttggcatgtgcatattaacaatctgtctgtaccatggacaacgttggttaatcatgcaacccaatataaccttccggaaccacactgccaacaccgctcccccagccatgcattgaagtgaaccctgctgattacaatgacaatgaagaacccaattctctcgaccgtgaatcacttgagaatgaaaaatatctatagtggcacaacatagacataaatgcatgcatcttctcataatttttaactcctcaggatttagaaacatatcccagggaataggaagctcttgcagaacagtaaagctggcagaacaaggaagaccacgaacacaacttacactatgcatagtcatagtatcacaatctggcaacagcgggtggtcttcagtcatagaagctcgggtttcattttcctcacaacgtggtaactgggctctggtgtaagggtgatgtctggcgcatgatgtcgagcgtgcgcgcaaccttgtcataatggagttgcttcctgacattctcgtattttgtatagcaaaacgcggccctggcagaacacactcttcttcgccttctatcctgccgcttagcgtgttccgtgtgatagttcaagtacaaccacactcttaagttggtcaaaagaatgctggcttcagttgtaatcaaaactccatcgcatctaatcgttctgaggaaatcatccaagcaatgcaactggattgtgtttcaagcaggagaggagagggaagagacggaagaaccatgttaatttttattccaaacgatctcgcagtacttcaaattgtagatcgcgcagatggcatctctcgcccccactgtgttggtgaaaaagcacagctagatcaaaagaaatgcgattttcaaggtgctcaacggtggcttccagcaaagcctccacgcgcacatccaagaacaaaagaataccaaaagaaggagcattttctaactcctcaatcatcatattacattcctgcaccattcccagataattttcagctttccagccttgaattattcgtgtcagttcttgtggtaaatccaatccacacattacaaacaggtcccggagggcgccctccaccaccattcttaaacacaccctcataatgacaaaatatcttgctcctgtgtcacctgtagcgaattgagaatggcaacatcaattgacatgcccttggctctaagttcttctttaagttctagttgtaaaaactctctcatattatcaccaaactgcttagccagaagccccccgggaacaagagcaggggacgctacagtgcagtacaagcgcagacctccccaattggctccagcaaaaacaagattggaataagcatattgggaaccgccagtaatatcatcgaagttgctggaaatataatcaggcagagtttcttgtaaaaattgaataaaagaaaaatttgccaaaaaaacattcaaaacctctgggatgcaaatgcaataggttaccgcgctgcgctccaacattgttagttttgaattagtctgcaaaaataaaaaaaaaaacaagcgtcatatcatagtagcctgacgaacagatggataaatcagtctttccatcacaagacaagccacagggtctccagctcgaccctcgtaaaacctgtcatcatgattaaacaacagcaccgaaagttcctcgcggtgaccagcatgaataattcttgatgaagcatacaatccagacatgttagcatcagttaacgagaaaaaacagccaacatagcctttgggtataattatgcttaatcgtaagtatagcaaagccacccctcgcggatacaaagtaaaaggcacaggagaataaaaaatataattatttctctgctgctgttcaggcaacgtcgcccccggtccctctaaatacacatacaaagcctcatcagccatggcttaccagacaaagtacagcgggcacacaaagcacaagctctaaagtgactctccaacctctccacaatatatatatacacaagccctaaactgacgtaatgggagtaaagtgtaaaaaatcccgccaaacccaacacacaccccgaaactgcgtcaccagggaaaagtacagtttcacttccgcaatcccaacaggcgtaacttcctctttctcacggtacgtgatatcccactaacttgcaacgtcattttcccacggtcgcaccgccccttttagccgttaaccccacagccaatcaccacacgatccacactttttaaaatcacctcatttacatattggcaccattccatctataaggtatattatatagataga

SEQ ID NO: 107 - DNA, 35353 bp, Artificial Sequence
  Genome sequence of NG-764 virus
tctatctatataatataccttatagatggaatggtgccaatatgtaaatgaggtgattttaaaaagtgtggatcgtgtggtgattggctgtggggttaacggctaaaaggggcggtgcgaccgtgggaaaatgacgttttgtgggggtggagtttttttgcaagttgtcgcgggaaatgtgacgcataaaaaggcttttttctcacggaactacttagttttcccacggtatttaacaggaaatgaggtagttttgaccggatgcaagtgaaaattgttgattttcgcgcgaaaactgaatgaggaagtgtttttctgaataatgtggtatttatggcagggtggagtatttgttcagggccaggtagactttgacccattacgtggaggtttcgattaccgtgttttttacctgaatttccgcgtaccgtgtcaaagtcttctgtttttacgtaggtgtcagctgatcgctagggtatttatacctcagggtttgtgtcaagaggccactcttgagtgccagcgagaagagttttctcctctgcgccggcagtttaataataaaaaaatgagagatttgcgatttctgcctcaggaaataatctctgctgagactggaaatgaaatattggagcttgtggtgcacgccctgatgggagacgatccggagccacctgtgcagctttttgagcctcctacgcttcaggaactgtatgatttagaggtagagggatcggaggattctaatgaggaagctgtaaatggcttttttaccgattctatgcttttagctgctaatgaagggttagaattagatccgcctttggacacttttgatactccaggggtaattgtggaaagcggtacaggtgtaagaaaattacctgatttgagttccgtggactgtgatttgcactgctatgaagacgggtttcctccgagtgatgaggaggaccatgaaaaggagcagtccatgcagactgcagcgggtgagggagtgaaggctgccaatgttggttttcagttggattgcccggagcttcctggacatggctgtaagtcttgtgaatttcacaggaaaaatactggagtaaaggaactgttatgttcgctttgttatatgagaacgcactgccactttatttacagtaagtgtgtttaagttaaaatttaaaggaatatgctgtttttcacatgtatattgagtgtgagttttgtgcttcttattataggtcctgtgtctgatgctgatgaatcaccatctcctgattctactacctcacctcctgagattcaagcacctgttcctgtggacgtgcgcaagcccattcctgtgaagcttaagcctgggaaacgtccagcagtggaaaaacttgaggacttgttacagggtggggacggacctttggacttgagtacacggaaacgtccaagacaataagtgttccatatccgtgtttacttaaggtgacgtcaatatttgtgtgacagtgcaatgtaataaaaatatgttaactgttcactggtttttattgctttttgggcggggactcaggtatataagtagaagcagacctgtgtggttagctcataggagctggctttcatccatggaggtttgggccattttggaagaccttaggaagactaggcaactgttagagaacgcttcggacggagtctccggtttttggagattctggttcgctagtgaattagctagggtagtttttaggataaaacaggactataaacaagaatttgaaaagttgttggtagattgcccaggactttttgaagctcttaatttgggccatcaggttcactttaaagaaaaagttttatcagttttagacttttcaaccccaggtagaactgctgctgctgtggcttttcttacttttatattagataaatggatcccgcagactcatttcagcaggggatacgttttggatttcatagccacagcattgtggagaacatggaaggttcgcaagatgaggacaatcttaggttactggccagtgcagcctttgggtgtagcgggaatcctgaggcatccaccggtcatgccagcggttctggaggaggaacagcaagaggacaacccgagagccggcctggaccctccagtggaggaggcggagtagctgacttgtctcctgaactgcaacgggtgcttactggatctacgtccactggacgggataggggcgttaagagggagagggcatctagtggtactgatgctagatctgagttggctttaagtttaatgagtcgcagacgtcctgaaaccatttggtggcatgaggttcagaaagagggaagggatgaagtttctgtattgcaggagaaatattcactggaacaggtgaaaacatgttggttggagcctgaggatgattgggaggtggccattaaaaattatgccaagatagctttgaggcctgataaacagtataagattactagacggattaatatccggaatgcttgttacatatctggaaatggggctgaggtggtaatagatactcaagacaaggcagttattagatgctgcatgatggatatgtggcctggggtagtcggtatggaagcagtaacttttgtaaatgttaagtttaggggagatggttataatggaatagtgtttatggccaataccaaacttatattgcatggttgtagcttttttggtttcaacaatacctgtgtagatgcctggggacaggttagtgtacggggatgtagtttctatgcgtgttggattgccacagctggcagaaccaagagtcaattgtctctgaagaaatgcatatttcaaagatgtaacctgggcattctgaatgaaggcgaagcaagggtccgccactgcgcttctacagatactggatgttttattttgattaagggaaatgccagcgtaaagcataacatgatttgcggtgcttccgatgagaggccttatcaaatgctcacttgtgctggtgggcattgtaatatgctggctactgtgcatattgtttcccatcaacgcaaaaaatggcctgtttttgatcacaatgtgatgacgaagtgtaccatgcatgcaggtgggcgtagaggaatgtttatgccttaccagtgtaacatgaatcatgtgaaagtgttgttggaaccagatgccttttccagaatgagcctaacaggaatttttgacatgaacatgcaaatctggaagatcctgaggtatgatgatacgagatcgagggtacgcgcatgcgaatgcggaggcaagcatgccaggttccagccggtgtgtgtagatgtgactgaagatctcagaccggatcatttggttattgcccgcactggagcagagttcggatccagtggagaagaaactgactaaggtgagtattgggaaaactttggggtgggattttcagatggacagattgagtaaaaatttgttttttctgtcttgcagctgtcatgagtggaaacgcttcttttaaggggggagtcttcagcccttatctgacagggcgtctcccatcctgggcaggagttcgtcagaatgttatgggatctactgtggatggaagacccgtccaacccgccaattcttcaacgctgacctatgctactttaagttcttcacctttggacgcagctgcagctgccgccgccgcttctgttgccgctaacactgtgcttggaatgggttactatggaagcatcatggctaattccacttcctctaataacccttctaccctgactcaggacaagttacttgtccttttggcccagctggaggctttgacccaacgtctgggtgaactttctcagcaggtggtcgagttgcgagtacaaactgagtctgctgtcggcacggcaaagtctaaataaaaaaatcccagaatcaatgaataaataaacaagcttgttgttgatttaaaatcaagtgtttttatttcatttttcgcgcacggtatgccctagaccaccgatctctatcattgagaactcggtggattttttccaggatcctatagaggtgggattgaatgtttagatacatgggcattaggccgtctttggggtggagatagctccattgaagggattcatgctccggggtagtgttgtaaatcacccagtcataacaaggtcgcagtgcatggtgttgcacaatatcttttagaagtaggctgattgccacagataagcccttggtgtaggtgtttacaaaccggttgagctgggatgggtgcattcggggtgaaattatgtgcattttggattggatttttaagttggcaatattgccgccaagatcccgtcttgggttcatgttatgaaggaccaccaagacggtgtatccggtacatttaggaaatttatcgtgcagcttggatggaaaagcgtggaaaaatttggagacacccttgtgtcctccaagattttccatgcactcatccatgataatagcaatggggccgtgggcagcggcgcgggcaaacacgttccgtgggtctgacacatcatagttatgttcctgagttaaatcatcataagccattttaatgaatttggggcggagagtaccagattggggtatgaatgttccttcgggccccggagcatagttcccctcacagatttgcatttcccaagctttcagttccgagggtggaatcatgtccacctggggggctatgaaaaacaccgtttctggggcgggggtgattaattgtgatgatagcaaatttctgagcaattgagatttgccacatccggtggggccataaatgattccgattacgggttgcaggtggtagtttagggaacggcaactgccgtcttctcgaagcaagggggccacctcgttcatcatttcccttacatgcatattttcccgcaccaaatccattaggaggcgctctcctcctagtgatagaagttcttgtagtgaggaaaagtttttcagcggtttcagaccgtcagccatgggcattttggagagagtttgctgcaaaagttctagtctgttccacagttcagtgatgtgttctatggcatctcgatccagcagacctcctcgtttcgcgggtttggacggctcctggaatagggtatgagacgatgggcgtccagcgctgccagggttcggtccttccagggtctcagtgttcgagtcagggttgtttccgtcacagtgaaggggtgtgcgcctgcttgggcgcttgccagggtgcgcttcagactcatcctgctggtcgaaaacttctgtcgcttggcgccctgtatgtcggccaagtagcagtttaccatgagttcgtagttgagcgcctcggctgcgtggcctttggcgcggagcttacctttggaagttttcttgcataccgggcagtataggcatttcagcgcatacaacttgggcgcaaggaaaacggattctggggagtatgcatctgcgccgcaggaggcgcaaacagtttcacattccaccagccaggttaaatccggttcattggggtcaaaaacaagttttccgccatattttttgatgcgtttcttacctttggtctccatgagttcgtgtcctcgttgagtgacaaacaggctgtccgtgtccccgtagactgattttacaggcctcttctccagtggagtgcctcggtcttcttcgtacaggaactctgaccactctgatacaaaggcgcgcgtccaggccagcacaaaggaggctatgtgggaggggtagcgatcgttgtcaaccagggggtccaccttttccaaagtatgcaaacacatgtcaccctcttcaacatccaggaatgtgattggcttgtaggtgtatttcacgtgacctggggtccccgctgggggggtataaaagggggcggttctttgctcttcctcactgtcttccggatcgctgtccaggaacgtcagctgttggggtaggtattccctctcgaaggcgggcatgacctctgcactcaggttgtcagtttctaagaacgaggaggatttgatattgacagtgccggttgagatgcctttcatgaggttttcgtccatctggtcagaaaacacaatttttttattgtcaagtttggtggcaaatgatccatacagggcgttggataaaagtttggcaatggatcgcatggtttggttcttttccttgtccgcgcgctctttggcggcgatgttgagttggacatactcgcgtgccaggcacttccattcggggaagatagttgttaattcatctggcacgattctcacttgccaccctcgattatgcaaggtaattaaatccacactggtggccacctcgcctcgaaggggttcattggtccaacagagcctacctcctttcctagaacagaaagggggaagtgggtctagcataagttcatcgggagggtctgcatccatggtaaagattcccggaagtaaatccttatcaaaatagctgatgggagtggggtcatctaaggccatttgccattctcgagctgccagtgcgcgctcatatgggttaaggggactgccccatggcatgggatgggtgagtgcagaggcatacatgccacagatgtcatagacgtagatgggatcctcaaagatgcctatgtaggttggatagcatcgcccccctctgatacttgctcgcacatagtcatatagttcatgtgatggcgctagcagccccggacccaagttggtgcgattgggtttttctgttctgtagacgatctggcgaaagatggcgtgagaattggaagagatggtgggtctttgaaaaatgttgaaatgggcatgaggtagacctacagagtctctgacaaagtgggcataagattcttgaagcttggttaccagttcggcggtgacaagtacgtctagggcgcagtagtcaagtgtttcttgaatgatgtcataacctggttggtttttcttttcccacagttcgcggttgagaaggtattcttcgcgatccttccagtactcttctagcggaaacccgtctttgtctgcacggtaagatcctagcatgtagaactgattaactgccttgtaagggcagcagcccttctctacgggtagagagtatgcttgagcagcttttcgtagcgaagcgtgagtaagggcaaaggtgtctctgaccatgactttgaggaattggtatttgaagtcgatgtcgtcacaggctccctgttcccagagttggaagtctacccgtttcttgtaggcggggttgggcaaagcgaaagtaacatcattgaagagaatcttgccggccctgggcatgaaattgcgagtgatgcgaaaaggctgtggtacttccgctcggttattgataacctgggcagctaggacgatctcgtcgaaaccgttgatgttgtgtcctacgatgtataattctatgaaacgcggcgtgcctctgacgtgaggtagcttactgagctcatcaaaggttaggtctgtggggtcagataaggcgtagtgttcgagagcccattcgtgcaggtgaggattcgctttaaggaaggaggaccagaggtccactgccagtgctgtttgtaactggtcccggtactgacgaaaatgccgtccgactgccattttttctggggtgacgcaatagaaggtttgggggtcctgccgccagcgatcccacttgagttttatggcgaggtcataggcgatgttgacgagccgctggtctccagagagtttcatgaccagcatgaaggggattagctgcttgccaaaggaccccatccaggtgtaggtttccacatcgtaggtgagaaagagcctttctgtgcgaggatgagagccaatcgggaagaactggatctcctgccaccagttggaggaatggctgttgatgtgatggaagtagaactccctgcgacgcgccgagcattcatgcttgtgcttgtacagacggccgcagtagtcgcagcgttgcacgggttgtatctcgtgaatgagttgtacctggcttcccttgacgagaaatttcagtgggaagccgaggcctggcgattgtatctcgtgctttactatgttgtctgcatcggcctgttcatcttctgtctcgatggtggtcatgctgacgagccctcgcgggaggcaagtccagacctcggcgcggcaggggcggagctcgaggacgagagcgcgcaggctggagctgtccagggtcctgagacgctgcggactcaggttagtaggcagtgtcaggagattaacttgcatgatcttttggagggcgtgcgggaggttcagatagtacttgatctcaacgggtccgttggtggagatgtcgatggcttgcagggttccgtgtcccttgggcgctaccaccgtgcccttgtttttcattttggacggcggtggctctgttgcttcttgcatgtttagaagcggtgtcgagggcgcgcaccgggcggcaggggcggctcgggacccggcggcatggctggcagtggtacgtcggcgccgcgcgcgggtaggttctggtactgcgccctgagaagactcgcatgcgcgacgacgcggcggttgacatcctggatctgacgcctctgggtgaaagctaccggccccgtgagcttgaacctgaaagagagttcaacagaatcaatctcggtatcgttgacggcggcttgcctaaggatttcttgcacgtcaccagagttgtcctggtaggcgatctccgccatgaactgctcgatctcttcctcttgaagatctccgcggcccgctctctcgacggtggccgcgaggtcgttggagatgcgcccaatgagttgagagaatgcattcatgcccgcctcgttccagacgcggctgtagaccacggcccccacgggatctctcgcgcgcatgaccacctgggcgaggttgagctccacgtggcgggtgaagaccgcatagttgcataggcgctggaaaaggtagttgagtgtggtggcgatgtgctcggtgacgaagaaatacatgatccatcgtctcagcggcatctcgctgacatcgcccagagcttccaagcgctccatggcctcgtagaagtccacggcaaaattaaaaaactgggagtttcgcgcggacacggtcaactcctcttccagaagacggataagttcggcgatggtggtgcgcacctcgcgctcgaaagcccctgggatttcttcctcaatctcttcttcttccactaacatctcttcctcttcaggtggggctgcaggaggagggggaacgcggcgacgccggcggcgcacgggcagacggtcgatgaatctttcaatgacctctccgcggcggcggcgcatggtttcagtgacggcgcggccgttctcgcgcggtcgcagagtaaaaacaccgccgcgcatctccttaaagtggtgactgggaggttctccgtttgggagggagagggcgctgattatacattttattaattggcccgtagggactgcacgcagagatctgatcgtgtcaagatccacgggatctgaaaacctttcgacgaaagcgtctaaccagtcacagtcacaaggtaggctgagtacggcttcttgtgggcgggggtggttatgtgttcggtctgggtcttctgtttcttcttcatctcgggaaggtgagacgatgctgctggtgatgaaattaaagtaggcagttctaagacggcggatggtggcgaggagcaccaggtctttgggtccggcttgctggatacgcaggcgattggccattccccaagcattatcctgacatctagcaagatctttgtagtagtcttgcatgagccgttctacgggcacttcttcctcacccgttctgccatgcatacgtgtgagtccaaatccgcgcattggttgtaccagtgccaagtcagctacgactctttcggcgaggatggcttgctgtacttgggtaagggtggcttgaaagtcatcaaaatccacaaagcggtggtaagctcctgtattaatggtgtaagcacagttggccatgactgaccagttaactgtctggtgaccagggcgcacgagctcggtgtatttaaggcgcgaataggcgcgggtgtcaaagatgtaatcgttgcaggtgcgcaccagatactggtaccctataagaaaatgcggcggtggttggcggtagagaggccatcgttctgtagctggagcgccaggggcgaggtcttccaacataaggcggtgatagccgtagatgtacctggacatccaggtgattcctgcggcggtagtagaagcccgaggaaactcgcgtacgcggttccaaatgttgcgtagcggcatgaagtagttcattgtaggcacggtttgaccagtgaggcgcgcgcagtcattgatgctctatagacacggagaaaatgaaagcgttcagcgactcgactccgtagcctggaggaacgtgaacgggttgggtcgcggtgtaccccggttcgagacttgtactcgagccggccggagccgcggctaacgtggtattggcactcccgtctcgacccagcctacaaaaatccaggatacggaatcgagtcgttttgctggtttccgaatggcagggaagtgagtcctattttttttttttgccgctcagatgcatcccgtgctgcgacagatgcgcccccaacaacagcccccctcgcagcagcagcagcagcaatcacaaaaggctgtccctgcaactactgcaactgccgccgtgagcggtgcgggacagcccgcctatgatctggacttggaagagggcgaaggactggcacgtctaggtgcgccttcacccgagcggcatccgcgagttcaactgaaaaaagattctcgcgaggcgtatgtgccccaacagaacctatttagagacagaagcggcgaggagccggaggagatgcgagcttcccgctttaacgcgggtcgtgagctgcgtcacggtttggaccgaagacgagtgttgcgggacgaggatttcgaagttgatgaaatgacagggatcagtcctgccagggcacacgtggctgcagccaaccttgtatcggcttacgagcagacagtaaaggaagagcgtaacttccaaaagtcttttaataatcatgtgcgaaccctgattgcccgcgaagaagttacccttggtttgatgcatttgtgggatttgatggaagctatcattcagaaccctactagcaaacctctgaccgcccagctgtttctggtggtgcaacacagcagagacaatgaggctttcagagaggcgctgctgaacatcaccgaacccgaggggagatggttgtatgatcttatcaacattctacagagtatcatagtgcaggagcggagcctgggcctggccgagaaggtggctgccatcaattactcggttttgagcttgggaaaatattacgctcgcaaaatctacaagactccatacgttcccatagacaaggaggtgaagatagatgggttctacatgcgcatgacgctcaaggtcttgaccctgagcgatgatcttggggtgtatcgcaatgacagaatgcatcgcgcggttagcgccagcaggaggcgcgagttaagcgacagggaactgatgcacagtttgcaaagagctctgactggagctggaaccgagggtgagaattacttcgacatgggagctgacttgcagtggcagcctagtcgcagggctctgagcgccgcgacggcaggatgtgagcttccttacatagaagaggcggatgaaggcgaggaggaagagggcgagtacttggaagactgatggcacaacccgtgttttttgctagatggaacagcaagcaccggatcccgcaatgcgggcggcgctgcagagccagccgtccggcattaactcctcggacgattggacccaggccatgcaacgtatcatggcgttgacgactcgcaaccccgaagcctttagacagcaaccccaggccaaccgtctatcggccatcatggaagctgtagtgccttcccgctctaatcccactcatgagaaggtcctggccatcgtgaacgcgttggtggagaacaaagctattcgtccagatgaggccggactggtatacaacgctctcttagaacgcgtggctcgctacaacagtagcaatgtgcaaaccaatttggaccgtatgataacagatgtacgcgaagccgtgtctcagcgcgaaaggttccagcgtgatgccaacctgggttcgctggtggcgttaaatgctttcttgagtactcagcctgctaatgtgccgcgtggtcaacaggattatactaactttttaagtgctttgagactgatggtatcagaagtacctcagagcgaagtgtatcagtccggtcctgattacttctttcagactagcagacagggcttgcagacggtaaatctgagccaagcttttaaaaaccttaaaggtttgtggggagtgcatgccccggtaggagaaagagcaaccgtgtctagcttgttaactccgaactcccgcctattattactgttggtagctcctttcaccgacagcggtagcatcgaccgtaattcctatttgggttacctactaaacctgtatcgcgaagccatagggcaaagtcaggtggacgagcagacctatcaagaaattacccaagtcagtcgcgctttgggacaggaagacactggcagtttggaagccactctgaacttcttgcttaccaatcggtctcaaaagatccctcctcaatatgctcttactgcggaggaggagaggatccttagatatgtgcagcagagcgtgggattgtttctgatgcaagagggggcaactccgactgcagcactggacatgacagcgcgaaatatggagcccagcatgtatgccagtaaccgacctttcattaacaaactgctggactacttgcacagagctgccgctatgaactctgattatttcaccaatgccatcttaaacccgcactggctgcccccacctggtttctacacgggcgaatatgacatgcccgaccctaatgacggatttctgtgggacgacgtggacagcgatgttttttcacctctttctgatcatcgcacgtggaaaaaggaaggcggcgatagaatgcattcttctgcatcgctgtccggggtcatgggtgctaccgcggctgagcccgagtctgcaagtccttttcctagtctacccttttctctacacagtgtacgtagcagcgaagtgggtagaataagtcgcccgagtttaatgggcgaagaggagtatctaaacgattccttgctcagaccggcaagagaaaaaaatttcccaaacaatggaatagaaagtttggtggataaaatgagtagatggaagacttatgctcaggatcacagagacgagcctgggatcatggggattacaagtagagcgagccgtagacgccagcgccatgacagacagaggggtcttgtgtgggacgatgaggattcggccgatgatagcagcgtgctggacttgggtgggagaggaaggggcaacccgtttgctcatttgcgccctcgcttgggtggtatgttgtaaaaaaaaataaaaaaaaaactcaccaaggccatggcgacgagcgtacgttcgttcttctttattatctgtgtctagtataatgaggcgagtcgtgctaggcggagcggtggtgtatccggagggtcctcctccttcgtacgagagcgtgatgcagcagcagcaggcgacggcggtgatgcaatccccactggaggctccctttgtgcctccgcgatacctggcacctacggagggcagaaacagcattcgttattcggaactggcacctcagtacgataccaccaggttgtatctggtggacaacaagtcggcggacattgcttctctgaactatcagaatgaccacagcaacttcttgaccacggtggtgcaaaacaatgactttacccctacggaagccagcacccagaccattaactttgatgaacgatcgcggtggggcggtcagctaaagaccatcatgcatactaacatgccaaacgtgaacgagtatatgtttagtaacaagttcaaagcgcgtgtgatggtgtccagaaaacctcccgacggtgctgcagttggggatacttatgatcacaagcaggatattttgaaatatgagtggttcgagtttactttgccagaaggcaacttttcagttactatgactattgatttgatgaacaatgccatcatagataattacttgaaagtgggtagacagaatggagtgcttgaaagtgacattggtgttaagttcgacaccaggaacttcaagctgggatgggatcccgaaaccaagttgatcatgcctggagtgtatacgtatgaagccttccatcctgacattgtcttactgcctggctgcggagtggattttaccgagagtcgtttgagcaaccttcttggtatcagaaaaaaacagccatttcaagagggttttaagattttgtatgaagatttagaaggtggtaatattccggccctcttggatgtagatgcctatgagaacagtaagaaagaacaaaaagccaaaatagaagctgctacagctgctgcagaagctaaggcaaacatagttgccagcgactctacaagggttgctaacgctggagaggtcagaggagacaattttgcgccaacacctgttccgactgcagaatcattattggccgatgtgtctgaaggaacggacgtgaaactcactattcaacctgtagaaaaagatagtaagaatagaagctataatgtgttggaagacaaaatcaacacagcctatcgcagttggtatctttcgtacaattatggcgatcccgaaaaaggagtgcgttcctggacattgctcaccacctcagatgtcacctgcggagcagagcaggtctactggtcgcttccagacatgatgaaggatcctgtcactttccgctccactagacaagtcagtaactaccctgtggtgggtgcagagcttatgcccgtcttctcaaagagcttctacaacgaacaagctgtgtactcccagcagctccgccagtccacctcgcttacgcacgtcttcaaccgctttcctgagaaccagattttaatccgtccgccggcgcccaccattaccaccgtcagtgaaaacgttcctgctctcacagatcacgggaccctgccgttgcgcagcagtatccggggagtccaacgtgtgaccgttactgacgccagacgccgcacctgtccctacgtgtacaaggcactgggcatagtcgcaccgcgcgtcctttcaagccgcactttctaaaaaaaaaaaaaatgtccattcttatctcgcccagtaataacaccggttggggtctgcgcgctccaagcaagatgtacggaggcgcacgcaaacgttctacccaacatcctgtccgtgttcgcggacattttcgcgctccatggggcgccctcaagggccgcactcgcgttcgaaccaccgtcgatgatgtaatcgatcaggtggttgccgacgcccgtaattatactcctactgcgcctacatctactgtggatgcagttattgacagtgtagtggctgacgctcgcaactatgctcgacgtaagagccggcgaaggcgcattgccagacgccaccgagctaccactgccatgcgagccgcaagagctctgctacgaagagctagacgcgtggggcgaagagccatgcttagggcggccagacgtgcagcttcgggcgccagcgccggcaggtcccgcaggcaagcagccgctgtcgcagcggcgactattgccgacatggcccaatcgcgaagaggcaatgtatactgggtgcgtgacgctgccaccggtcaacgtgtacccgtgcgcacccgtccccctcgcacttagaagatactgagcagtctccgatgttgtgtcccagcggcgaggatgtccaagcgcaaatacaaggaagaaatgctgcaggttatcgcacctgaagtctacggccaaccgttgaaggatgaaaaaaaaccccgcaaaatcaagcgggttaaaaaggacaaaaaagaagaggaagatggcgatgatgggctggcggagtttgtgcgcgagtttgccccacggcgacgcgtgcaatggcgtgggcgcaaagttcgacatgtgttgagacctggaacttcggtggtctttacacccggcgagcgttcaagcgctacttttaagcgttcctatgatgaggtgtacggggatgatgatattcttgagcaggcggctgaccgattaggcgagtttgcttatggcaagcgtagtagaataacttccaaggatgagacagtgtcgatacccttggatcatggaaatcccacccctagtcttaaaccggtcactttgcagcaagtgttacccgtaactccgcgaacaggtgttaaacgcgaaggtgaagatttgtatcccactatgcaactgatggtacccaaacgccagaagttggaggacgttttggagaaagtaaaagtggatccagatattcaacctgaggttaaagtgagacccattaagcaggtagcgcctggtctgggggtacaaactgtagacattaagattcccactgaaagtatggaagtgcaaactgaacccgcaaagcctactgccacctccactgaagtgcaaacggatccatggatgcccatgcctattacaactgacgccgccggtcccactcgaagatcccgacgaaagtacggtccagcaagtctgttgatgcccaattatgttgtacacccatctattattcctactcctggttaccgaggcactcgctactatcgcagccgaaacagtacctcccgccgtcgccgcaagacacctgcaaatcgcagtcgtcgccgtagacgcacaagcaaaccgactcccggcgccctggtgcggcaagtgtaccgcaatggtagtgcggaacctttgacactgccgcgtgcgcgttaccatccgagtatcatcacttaatcaatgttgccgctgcctccttgcagatatggccctcacttgtcgccttcgcgttcccatcactggttaccgaggaagaaactcgcgccgtagaagagggatgttgggacgcggaatgcgacgctacaggcgacggcgtgctatccgcaagcaattgcggggtggttttttaccagccttaattccaattatcgctgctgcaattggcgcgataccaggcatagcttccgtggcggttcaggcctcgcaacgacattgacattggaaaaaaacgtataaataaaaaaaaaaaaatacaatggactctgacactcctggtcctgtgactatgttttcttagagatggaagacatcaatttttcatccttggctccgcgacacggcacgaagccgtacatgggcacctggagcgacatcggcacgagccaactgaacgggggcgccttcaattggagcagtatctggagcgggcttaaaaattttggctcaaccataaaaacatacgggaacaaagcttggaacagcagtacaggacaggcgcttagaaataaacttaaagaccagaacttccaacaaaaagtagtcgatgggatagcttccggcatcaatggagtggtagatttggctaaccaggctgtgcagaaaaagataaacagtcgtttggacccgccgccagcaaccccaggtgaaatgcaagtggaggaagaaattcctccgccagaaaaacgaggcgacaagcgtccgcgtcccgatttggaagagacgctggtgacgcgcgtagatgaaccgccttcttatgaggaagcaacgaagcttggaatgcccaccactagaccgatagccccaatggccaccggggtgatgaaaccttctcagttgcatcgacccgtcaccttggatttgccccctccccctgctgctactgctgtacccgcttctaagcctgtcgctgccccgaaaccagtcgccgtagccaggtcacgtcccgggggcgctcctcgtccaaatgcgcactggcaaaatactctgaacagcatcgtgggtctaggcgtgcaaagtgtaaaacgccgtcgctgcttttaattaaatatggagtagcgcttaacttgcctatctgtgtatatgtgtcattacacgccgtcacagcagcagaggaaaaaaggaagaggtcgtgcgtcgacgctgagttactttcaagatggccaccccatcgatgctgccccaatgggcatacatgcacatcgccggacaggatgcttcggagtacctgagtccgggtctggtgcagttcgcccgcgccacagacacctacttcaatctgggaaataagtttagaaatcccaccgtagcgccgacccacgatgtgaccaccgaccgtagccagcggctcatgttgcgcttcgtgcccgttgaccgggaggacaatacatactcttacaaagtgcggtacaccctggccgtgggcgacaacagagtgctggatatggccagcacgttctttgacattaggggtgtgttggacagaggtcccagtttcaaaccctattctggtacggcttacaactccctggctcctaaaggcgctccaaatacatctcagtggattgcagaaggtgtaaaaaatacaactggtgaggaacacgtaacagaagaggaaaccaatactactacttacacttttggcaatgctcctgtaaaagctgaagctgaaattacaaaagaaggactcccagtaggtttggaagtttcagatgaagaaagtaaaccgatttatgctgataaaacatatcagccagaacctcagctgggagatgaaacttggactgaccttgatggaaaaaccgaaaagtatggaggcagggctctcaaacccgatactaagatgaaaccatgctacgggtcctttgccaaacctactaatgtgaaaggcggtcaggcaaaacaaaaaacaacggagcagccaaatcagaaagtcgaatatgatatcgacatggagttttttgatgcggcatcgcagaaaacaaacttaagtcctaaaattgtcatgtatgcagaaaatgtaaatttggaaactccagacactcatgtagtgtacaaacctggaacagaagacacaagttccgaagctaatttgggacaacaatctatgcccaacagacccaactacattggcttcagagataactttattggacttatgtactataacagtactggtaacatgggggtgctggctggtcaagcgtctcagttaaatgcagtggttgacttgcaggacagaaacacagaactttcttaccaactcttgcttgactctctgggcgacagaaccagatactttagcatgtggaatcaggctgtggacagttatgatcctgatgtacgtgttattgaaaatcatggtgtggaagatgaacttcccaactactgttttccactggacggcataggtgttccaacaaccagttacaaatcaatagttccaaatggagacaatgcgcctaattggaaggaacctgaagtaaatggaacaagtgagatcggacagggtaatttgtttgccatggaaattaaccttcaagccaatctatggcgaagtttcctttattccaatgtggctctatatctcccagactcgtacaaatacaccccgtccaatgtcactcttccagaaaacaaaaacacctacgactacatgaacgggcgggtggtgccgccatctctagtagacacctatgtgaacattggtgccaggtggtctctggatgccatggacaatgtcaacccattcaaccaccaccgtaacgctggcttgcgttaccgatccatgcttctgggtaacggacgttatgtgcctttccacatacaagtgcctcaaaaattcttcgctgttaaaaacctgctgcttctcccaggctcctacacttatgagtggaactttaggaaggatgtgaacatggttctacagagttccctcggtaacgacctgcgggtagatggcgccagcatcagtttcacgagcatcaacctctatgctacttttttccccatggctcacaacaccgcttccacccttgaagccatgctgcggaatgacaccaatgatcagtcattcaacgactacctatctgcagctaacatgctctaccccattcctgccaatgcaaccaatattcccatttccattccttctcgcaactgggcggctttcagaggctggtcatttaccagactgaaaaccaaagaaactccctctttggggtctggatttgacccctactttgtctattctggttctattccctacctggatggtaccttctacctgaaccacacttttaagaaggtttccatcatgtttgactcttcagtgagctggcctggaaatgacaggttactatctcctaacgaatttgaaataaagcgcactgtggatggcgaaggctacaacgtagcccaatgcaacatgaccaaagactggttcttggtacagatgctcgccaactacaacatcggctatcagggcttctacattccagaaggatacaaagatcgcatgtattcatttttcagaaacttccagcccatgagcaggcaggtggttgatgaggtcaattacaaagacttcaaggccgtcgccataccctaccaacacaacaactctggctttgtgggttacatggctccgaccatgcgccaaggtcaaccctatcccgctaactatccctatccactcattggaacaactgccgtaaatagtgttacgcagaaaaagttcttgtgtgacagaaccatgtggcgcataccgttctcgagcaacttcatgtctatgggggcccttacagacttgggacagaatatgctctatgccaactcagctcatgctctggacatgacctttgaggtggatcccatggatgagcccaccctgctttatcttctcttcgaagttttcgacgtggtcagagtgcatcagccacaccgcggcatcatcgaggcagtctacctgcgtacaccgttctcggccggtaacgctaccacgtaagaagcttcttgcttcttgcaaatagcagctgcaaccatggcctgcggatcccaaaacggctccagcgagcaagagctcagagccattgtccaagacctgggttgcggaccctattttttgggaacctacgataagcgcttcccggggttcatggcccccgataagctcgcctgtgccattgtaaatacggccggacgtgagacggggggagagcactggttggctttcggttggaacccacgttctaacacctgctacctttttgatccttttggattctcggatgatcgtctcaaacagatttaccagtttgaatatgagggtctcctgcgccgcagcgctcttgctaccaaggaccgctgtattacgctggaaaaatctacccagaccgtgcagggtccccgttctgccgcctgcggacttttctgctgcatgttccttcacgcctttgtgcactggcctgaccgtcccatggacggaaaccccaccatgaaattgctaactggagtgccaaacaacatgcttcattctcctaaagtccagcccaccctgtgtgacaatcaaaaagcactctaccattttcttaatacccattcgccttattttcgctcccatcgtacacacatcgaaagggccactgcgttcgaccgtatggatgttcaataatgactcatgtaaacaacgtgttcaataaacatcactttatttttttacatgtatcaaggctctgcattacttatttatttacaagtcgaatgggttctgacgagaatcagaatgacccgcaggcagtgatacgttgcggaactgatacttgggttgccacttgaattcgggaatcaccaacttgggaaccggtatatcgggcaggatgtcactccacagctttctggtcagctgcaaagctccaagcaggtcaggagccgaaatcttgaaatcacaattaggaccagtgctttgagcgcgagagttgcggtacaccggattgcagcactgaaacaccatcagcgacggatgtctcacgcttgccagcacggtgggatctgcaatcatgcccacatccagatcttcagcattggcaatgctgaacggggtcatcttgcaggtctgcctacccatggcgggcacccaattaggcttgtggttgcaatcgcagtgcagggggatcagtatcatcttggcctgatcctgtctgattcctggatacacggctctcatgaaagcatcatattgcttgaaagcctgctgggctttactaccctcggtataaaacatcccgcaggacctgctcgaaaactggttagctgcacagccggcatcattcacacagcagcgggcgtcattgttagctatttgcaccacacttctgccccagcggttttgggtgattttggttcgctcgggattctcctttaaggctcgttgtccgttctcgctggccacatccatctcgataatctgctccttctgaatcataatattgccatgcaggcacttcagcttgccctcataatcattgcagccatgaggccacaacgcacagcctgtacattcccaattatggtgggcgatctgagaaaaagaatgtatcattccctgcagaaatcttcccatcatcgtgctcagtgtcttgtgactagtgaaagttaactggatgcctcggtgctcctcgtttacgtactggtgacagatgcgcttgtattgttcgtgttgctcaggcattagtttaaaagaggttctaagttcgttatccagcctgtacttctccatcagcagacacatcacttccatgcctttctcccaagcagacaccaggggcaagctaatcggattcttaacagtgcaggcagcagctcctttagccagagggtcatctttagcgatcttctcaatgcttcttttgccatccttctcaacgatgcgcacgggcgggtagctgaaacccactgctacaagttgcgcctcttctctttcttcttcgctgtcttgactgatgtcttgcatggggatatgtttggtcttccttggcttctttttggggggtatcggaggaggaggactgtcgctccgttccggagacagggaggattgtgacgtttcgctcaccattaccaactgactgtcggtagaagaacctgaccccacacggcgacaggtgtttctcttcgggggcagaggtggaggcgattgcgaagggctgcggtccgacctggaaggcggatgactggcagaaccccttccgcgttcgggggtgtgctccctgtggcggtcgcttaactgatttccttcgcggctggccattgtgttctcctaggcagagaaacaacagacatggaaactcagccattgctgtcaacatcgccacgagtgccatcacatctcgtcctcagcgacgaggaaaaggagcagagcttaagcattccaccgcccagtcctgccaccacctctaccctagaagataaggaggtcgacgcatctcatgacatgcagaataaaaaagcgaaagagtctgagacagacatcgagcaagacccgggctatgtgacaccggtggaacacgaggaagagttgaaacgctttctagagagagaggatgaaaactgcccaaaacaacgagcagataactatcaccaagatgctggaaatagggatcagaacaccgactacctcatagggcttgacggggaagacgcgctccttaaacatctagcaagacagtcgctcatagtcaaggatgcattattggacagaactgaagtgcccatcagtgtggaagagctcagccgcgcctacgagcttaacctcttttcacctcgtactccccccaaacgtcagccaaacggcacctgcgagccaaatcctcgcttaaacttttatccagcttttgctgtgccagaagtactggctacctatcacatcttttttaaaaatcaaaaaattccagtctcctgccgcgctaatcgcacccgcgccgatgccctactcaatctgggacctggttcacgcttacctgatatagcttccttggaagaggttccaaagatcttcgagggtctgggcaataatgagactcgggccgcaaatgctctgcaaaagggagaaaatggcatggatgagcatcacagcgttctggtggaattggaaggcgataatgccagactcgcagtactcaagcgaagcatcgaggtcacacacttcgcatatcccgctgtcaacctgccccctaaagtcatgacggcggtcatggaccagttactcattaagcgcgcaagtcccctttcagaagacatgcatgacccagatgcctgtgatgagggtaaaccagtggtcagtgatgagcagctaacccgatggctgggcaccgactctcccagggatttggaagagcgtcgcaagcttatgatggccgtggtgctggttaccgtagaactagagtgtctccgacgtttctttaccgattcagaaaccttgcgcaaactcgaagagaatctgcactacacttttagacacggctttgtgcggcaggcatgcaagatatctaacgtggaactcaccaacctggtttcctacatgggtattctgcatgagaatcgcctaggacaaagcgtgctgcacagcaccctgaagggggaagcccgccgtgattacatccgcgattgtgtctatctgtacctgtgccacacgtggcaaaccggcatgggtgtatggcagcaatgtttagaagaacagaacttgaaagagcttgacaagctcttacagaaatctcttaaggttctgtggacagggttcgacgagcgcaccgtcgcttccgacctggcagacctcatcttcccagagcgtctcagggttactttgcgaaacggattgcctgactttatgagccagagcatgcttaacaattttcgctctttcatcctggaacgctccggtatcctgcccgccacctgctgcgcactgccctccgactttgtgcctctcacctaccgcgagtgccccccgccgctatggagtcactgctacctgttccgtctggccaactatctctcctaccactcggatgtgatcgaggatgtgagcggagacggcttgctggagtgtcactgccgctgcaatctgtgcacgccccaccggtccctagcttgcaacccccagttgatgagcgaaacccagataataggcacctttgaattgcaaggccccagcagccaaggcgatgggtcttctcctgggcaaagtttaaaactgaccccgggactgtggacctccgcctacttgcgcaagtttgctccggaagattaccacccctatgaaatcaagttctatgaggaccaatcacagcctccaaaggccgaactttcggcctgcgtcatcacccagggggcaattctggcccaattgcaagccatccaaaaatcccgccaagaatttctactgaaaaagggtaagggggtctaccttgacccccagaccggcgaggaactcaacacaaggttccctcaggatgtcccaacgacgagaaaacaagaagttgaaggtgcagccgccgcccccagaagatatggaggaagattgggacagtcaggcagaggaggcggaggaggacagtctggaggacagtctggaggaagacagtttggaggaggaaaacgaggaggcagaggaggtggaagaagtaaccgccgacaaacagttatcctcggctgcggagacaagcaacagcgctaccatctccgctccgagtcgaggaacccggcggcgtcccagcagtagatgggacgagaccggacgcttcccgaacccaaccagcgcttccaagaccggtaagaaggatcggcagggatacaagtcctggcgggggcataagaatgccatcatctcctgcttgcatgagtgcgggggcaacatatccttcacgcggcgctacttgctattccaccatggggtgaactttccgcgcaatgttttgcattactaccgtcacctccacagcccctactatagccagcaaatcccggcagtctcgacagataaagacagcggcggcgacctccaacagaaaaccagcagcggcagttagaaaatacacaacaagtgcagcaacaggaggattaaagattacagccaacgagccagcgcaaacccgagagttaagaaatcggatctttccaaccctgtatgccatcttccagcagagtcggggtcaagagcaggaactgaaaataaaaaaccgatctctgcgttcgctcaccagaagttgtttgtatcacaagagcgaagatcaacttcagcgcactctcgaggacgccgaggctctcttcaacaagtactgcgcgctgactcttaaagagtaggcagcgaccgcgcttattcaaaaaaggcgggaattacatcatcctcgacatgagtaaagaaattcccacgccttacatgtggagttatcaaccccaaatgggattggcggcaggcgcctcccaggactactccacccgcatgaattggctcagcgccgggccttctatgatttctcgagttaatgatatacgcgcctaccgaaaccaaatacttttggaacagtcagctcttaccaccacgccccgccaacaccttaatcccagaaattggcccgccgccctagtgtaccaggaaagtcccgctcccaccactgtattacttcctcgagacgcccaggccgaagtccaaatgactaatgcaggtgcgcagttagctggcggctccaccctatgtcgtcacaggcctcggcataatataaaacgcctgatgatcagaggccgaggtatccagctcaacgacgagtcggtgagctctccgcttggtctacgaccagacggaatctttcagattgccggctgcgggagatcttccttcacccctcgtcaggctgttctgactttggaaagttcgtcttcgcaaccccgctcgggcggaatcgggaccgttcaatttgtggaggagtttactccctctgtctacttcaaccccttctccggatctcctgggcattacccggacgagttcataccgaacttcgacgcgattagcgagtcagtggacggctacgattgatgtctggtgacgcggctgagctatctcggctgcgacatctagaccactgccgccgctttcgctgctttgcccgggaactcattgagttcatctacttcgaactccccaaggatcaccctcaaggtccggcccacggagtgcggatttctatcgaaggcaaaatagactctcgcctgcaacgaattttctcccagcggcccgtgctgatcgagcgagaccagggaaacaccacggtttccatctactgcatttgtaatcaccccggattgcatgaaagcctttgctgtcttatgtgtactgagtttaataaaaactgaattaagactctcctacggactgccgcttcttcaacccggattttacaaccagaagaacgaaacttttcctgtcgtccaggactctgttaacttcacctttcctactcacaaactagaagctcaacgactacaccgcttttccagaagcattttccctactaatactactttcaaaaccggaggtgagctccaaggtcttcctacagaaaacccttgggtggaagcgggccttgtagtgctaggaattcttgcgggtgggcttgtgattattctttgctacctatacacaccttgcttcactttcttagtggtgttgtggtattggtttaaaaaatggggcccatactagtcttgcttgttttactttcgcttttggaaccgggttctgccaattacgatccatgtctagacttcgacccagaaaactgcacacttacttttgcacccgacacaagccgcatctgtggagttcatcgcctctcttacgaacttggcccccaacgacaaaaatttacctgcatggtgggaatcaaccccatagttatcacccagcaaagtggagatactaagggttgcattcactgctcctgcgattccatcgagtgcacctacaccctgctgaagaccctatgcggcctaagagacctgctaccaatgaattaaaaaatgattaataaaaaatcacttacttgaaatcagcaataaggtctctgttgaaattttctcccagcagcacctcacttccctcttcccaactctggtattctaaaccccgttcagcggcatactttctccatactttaaaggggatgtcaaattttagctcctctcctgtacccacaatcttcatgtctttcttcccagatgaccaagagagtccggctcagtgactccttcaaccctgtctacccctatgaagatgaaagcacctcccaacacccctttataaacccagggtttatttccccaaatggcttcacacaaagcccaaacggagttcttactttaaaatgtttaaccccactaacaaccacaggcggatctctacagctaaaagtgggagggggacttacagtggatgacaccaacggttttttgaaagaaaacataagtgccaccacaccactcgttaagactggtcactctataggtttaccactaggagccggattgggaacgaatgaaaataaactttgtatcaaattaggacaaggacttacattcaattcaaacaacatttgcattgatgacaatattaacaccttatggacaggagtcaaccccaccgaagccaactgtcaaatcatgaactccagtgaatctaatgattgcaaattaattctaacactagttaaaactggagcactagtcactgcatttgtttatgttataggagtatctaacaattttaatatgctaactacacacagaaatataaattttactgcagagctgtttttcgattctactggtaatttactaactagactctcatccctcaaaactccacttaatcataaatcaggacaaaacatggctactggtgccattactaatgctaaaggtttcatgcccagcacgactgcctatcctttcaatgataattctagagaaaaagaaaactacatttacggaacttgttactacacagctagtgatcgcactgcttttcccattgacatatctgtcatgcttaaccgaagagcaataaatgacgagacatcatattgtattcgtataacttggtcctggaacacaggagatgccccagaggtgcaaacctctgctacaaccctagtcacctccccatttaccttttactacatcagagaagacgactgacaaataaagtttgcgatcgccaggcccaccatggactggacctggcgcatcctgttcttggtggcagctgctacgggagctcattccaactgggtgaatgtaataagtgatttgaaaaaaattgaagatcttattcaatctatgcatattgatgctactttatatacggaaagtgatgttcaccccagttgcaaagtaacagcaatgaagtgctttctcttggagttacaagttatttcacttgagtccggagatgcaagtattcatgatacagtagaaaatctgatcatcctagcaaacaacagtttgtcttctaatgggaatgtaacagaatctggatgcaaagaatgtgaggaactggaggaaaaaaatattaaagaatttttgcagagttttgtacatattgtccaaatgttcatcaacacttctggaagcggagtgaaacagactttgaattttgaccttctcaagttggcgggagacgtggagtccaaccctggacctgccttgacctttgctttactggtggccctcctggtgctcagctgcaagtcaagctgctctgtgggctgtgatctgcctcaaacccacagcctgggtagcaggaggaccttgatgctcctggcacagatgaggagaatctctcttttctcctgcttgaaggacagacatgactttggatttccccaggaggagtttggcaaccagttccaaaaggctgaaaccatccctgtcctccatgagatgatccagcagatcttcaatctcttcagcacaaaggactcatctgctgcttgggatgagaccctcctagacaaattctacactgaactctaccagcagctgaatgacctggaagcctgtgtgatacagggggtgggggtgacagagactcccctgatgaaggaggactccattctggctgtgaggaaatacttccaaagaatcactctctatctgaaagagaagaaatacagcccttgtgcctgggaggttgtcagagcagaaatcatgagatctttttctttgtcaacaaacttgcaagaaagtttaagaagtaaggaaggaagcggacagtgtactaattatgctctcttgaaattggctggagatgttgagagcaaccctggacctatgtgtcaccagcagttggtcatctcttggttttccctggtttttctggcatctcccctcgtggccatatgggaactgaagaaagatgtttatgtcgtagaattggattggtatccggatgcccctggagaaatggtggtcctcacctgtgacacccctgaagaagatggtatcacctggaccttggaccagagcagtgaggtcttaggctctggcaaaaccctgaccatccaagtcaaagagtttggagatgctggccagtacacctgtcacaaaggaggcgaggttctaagccattcgctcctgctgcttcacaaaaaggaagatggaatttggtccactgatattttaaaggaccagaaagaacccaaaaataagacctttctaagatgcgaggccaagaattattctggacgtttcacctgctggtggctgacgacaatcagtactgatttgacattcagtgtcaaaagcagcagaggctcttctgacccccaaggggtgacgtgcggagctgctacactctctgcagagagagtcagaggggacaacaaggagtatgagtactcagtggagtgccaggaggacagtgcctgcccagctgctgaggagagtctgcccattgaggtcatggtggatgccgttcacaagctcaagtatgaaaactacaccagcagcttcttcatcagggacatcatcaaacctgacccacccaagaacttgcagctgaagccattaaagaattctcggcaggtggaggtcagctgggagtaccctgacacctggagtactccacattcctacttctccctgacattctgcgttcaggtccagggcaagagcaagagagaaaagaaagatagagtcttcacggacaagacctcagccacggtcatctgccgcaaaaatgccagcattagcgtgcgggcccaggaccgctactatagctcatcttggagcgaatgggcatctgtgccctgcagtggagggggcggcagcgggggaggcggcagcggcggcgggggatcgagaaacctccccgtggccactccagacccaggaatgttcccatgccttcaccactcccaaaacctgctgagggccgtcagcaacatgctccagaaggccagacaaactctagaattttacccttgcacttctgaagagattgatcatgaagatatcacaaaagataaaaccagcacagtggaggcctgtttaccattggaattaaccaagaatgagagttgcctaaattccagagagacctctttcataactaatgggagttgcctggcctccagaaagacctcttttatgatggccctgtgccttagtagtatttatgaagacttgaagatgtaccaggtggagttcaagaccatgaatgcaaagcttctgatggatcctaagaggcagatctttctagatcaaaacatgctggcagttattgatgagctgatgcaggccctgaatttcaacagtgagactgtgccacaaaaatcctcccttgaagaaccggatttttataaaactaaaatcaagctctgcatacttcttcatgctttcagaattcgggcagtgactattgatagagtgatgagctatctgaatgcttcctaagctagcttgactgactgagatacagcgtaccttcagctcacagacatgataagatacattgatgagtttggacaaaccacaactagaatgcagtgaaaaaaatgctttatttgtgaaatttgtgatgctattgctttatttgtaaccattataagctgcaataaacaagttaacaacaacaattgcattcattttatgtttcaggttcagggggaggtgtgggaggttttttaaagcaagtaaaacctctacaaatgtggtagtcgtcagctatcctgcaggaacttgtttatttgaaaatcaattcacaaaatccgagtagttattttgcctcccccttcccatttaacagaatacaccaatctctccccacgcacagctttaaacatttggataccattagatatagacatggttttagattccacattccaaacagtttcagagcgagccaatctggggtcagtgatagataaaaatccatcgggatagtcttttaaagcgctttcacagtccaactgctgcggatgcgactccggagtctggatcacggtcatctggaagaagaacgatgggaatcataatccgaaaacggtatcggacgattgtgtctcatcaaacccacaagcagccgctgtctgcgtcgctccgtgcgactgctgtttatgggatcagggtccacagtgtcctgaagcatgattttaatagcccttaacatcaactttctggtgcgatgcgcgcagcaacgcattctgatttcactcaaatctttgcagtaggtacaacacattattacaatattgtttaataaaccataattaaaagcgctccagccaaaactcatatctgatataatcgcccctgcatgaccatcataccaaagtttaatataaattaaatgacgttccctcaaaaacacactacccacatacatgatctcttttggcatgtgcatattaacaatctgtctgtaccatggacaacgttggttaatcatgcaacccaatataaccttccggaaccacactgccaacaccgctcccccagccatgcattgaagtgaaccctgctgattacaatgacaatgaagaacccaattctctcgaccgtgaatcacttgagaatgaaaaatatctatagtggcacaacatagacataaatgcatgcatcttctcataatttttaactcctcaggatttagaaacatatcccagggaataggaagctcttgcagaacagtaaagctggcagaacaaggaagaccacgaacacaacttacactatgcatagtcatagtatcacaatctggcaacagcgggtggtcttcagtcatagaagctcgggtttcattttcctcacaacgtggtaactgggctctggtgtaagggtgatgtctggcgcatgatgtcgagcgtgcgcgcaaccttgtcataatggagttgcttcctgacattctcgtattttgtatagcaaaacgcggccctggcagaacacactcttcttcgccttctatcctgccgcttagcgtgttccgtgtgatagttcaagtacaaccacactcttaagttggtcaaaagaatgctggcttcagttgtaatcaaaactccatcgcatctaatcgttctgaggaaatcatccaagcaatgcaactggattgtgtttcaagcaggagaggagagggaagagacggaagaaccatgttaatttttattccaaacgatctcgcagtacttcaaattgtagatcgcgcagatggcatctctcgcccccactgtgttggtgaaaaagcacagctagatcaaaagaaatgcgattttcaaggtgctcaacggtggcttccagcaaagcctccacgcgcacatccaagaacaaaagaataccaaaagaaggagcattttctaactcctcaatcatcatattacattcctgcaccattcccagataattttcagctttccagccttgaattattcgtgtcagttcttgtggtaaatccaatccacacattacaaacaggtcccggagggcgccctccaccaccattcttaaacacaccctcataatgacaaaatatcttgctcctgtgtcacctgtagcgaattgagaatggcaacatcaattgacatgcccttggctctaagttcttctttaagttctagttgtaaaaactctctcatattatcaccaaactgcttagccagaagccccccgggaacaagagcaggggacgctacagtgcagtacaagcgcagacctccccaattggctccagcaaaaacaagattggaataagcatattgggaaccgccagtaatatcatcgaagttgctggaaatataatcaggcagagtttcttgtaaaaattgaataaaagaaaaatttgccaaaaaaacattcaaaacctctgggatgcaaatgcaataggttaccgcgctgcgctccaacattgttagttttgaattagtctgcaaaaataaaaaaaaaaacaagcgtcatatcatagtagcctgacgaacagatggataaatcagtctttccatcacaagacaagccacagggtctccagctcgaccctcgtaaaacctgtcatcatgattaaacaacagcaccgaaagttcctcgcggtgaccagcatgaataattcttgatgaagcatacaatccagacatgttagcatcagttaacgagaaaaaacagccaacatagcctttgggtataattatgcttaatcgtaagtatagcaaagccacccctcgcggatacaaagtaaaaggcacaggagaataaaaaatataattatttctctgctgctgttcaggcaacgtcgcccccggtccctctaaatacacatacaaagcctcatcagccatggcttaccagacaaagtacagcgggcacacaaagcacaagctctaaagtgactctccaacctctccacaatatatatatacacaagccctaaactgacgtaatgggagtaaagtgtaaaaaatcccgccaaacccaacacacaccccgaaactgcgtcaccagggaaaagtacagtttcacttccgcaatcccaacaggcgtaacttcctctttctcacggtacgtgatatcccactaacttgcaacgtcattttcccacggtcgcaccgccccttttagccgttaaccccacagccaatcaccacacgatccacactttttaaaatcacctcatttacatattggcaccattccatctataaggtatattatatagataga

SEQ ID NO: 108 - DNA, 35161 bp, Artificial Sequence
  Genome sequence of NG-765 virus
tctatctatataatataccttatagatggaatggtgccaatatgtaaatgaggtgattttaaaaagtgtggatcgtgtggtgattggctgtggggttaacggctaaaaggggcggtgcgaccgtgggaaaatgacgttttgtgggggtggagtttttttgcaagttgtcgcgggaaatgtgacgcataaaaaggcttttttctcacggaactacttagttttcccacggtatttaacaggaaatgaggtagttttgaccggatgcaagtgaaaattgttgattttcgcgcgaaaactgaatgaggaagtgtttttctgaataatgtggtatttatggcagggtggagtatttgttcagggccaggtagactttgacccattacgtggaggtttcgattaccgtgttttttacctgaatttccgcgtaccgtgtcaaagtcttctgtttttacgtaggtgtcagctgatcgctagggtatttatacctcagggtttgtgtcaagaggccactcttgagtgccagcgagaagagttttctcctctgcgccggcagtttaataataaaaaaatgagagatttgcgatttctgcctcaggaaataatctctgctgagactggaaatgaaatattggagcttgtggtgcacgccctgatgggagacgatccggagccacctgtgcagctttttgagcctcctacgcttcaggaactgtatgatttagaggtagagggatcggaggattctaatgaggaagctgtaaatggcttttttaccgattctatgcttttagctgctaatgaagggttagaattagatccgcctttggacacttttgatactccaggggtaattgtggaaagcggtacaggtgtaagaaaattacctgatttgagttccgtggactgtgatttgcactgctatgaagacgggtttcctccgagtgatgaggaggaccatgaaaaggagcagtccatgcagactgcagcgggtgagggagtgaaggctgccaatgttggttttcagttggattgcccggagcttcctggacatggctgtaagtcttgtgaatttcacaggaaaaatactggagtaaaggaactgttatgttcgctttgttatatgagaacgcactgccactttatttacagtaagtgtgtttaagttaaaatttaaaggaatatgctgtttttcacatgtatattgagtgtgagttttgtgcttcttattataggtcctgtgtctgatgctgatgaatcaccatctcctgattctactacctcacctcctgagattcaagcacctgttcctgtggacgtgcgcaagcccattcctgtgaagcttaagcctgggaaacgtccagcagtggaaaaacttgaggacttgttacagggtggggacggacctttggacttgagtacacggaaacgtccaagacaataagtgttccatatccgtgtttacttaaggtgacgtcaatatttgtgtgacagtgcaatgtaataaaaatatgttaactgttcactggtttttattgctttttgggcggggactcaggtatataagtagaagcagacctgtgtggttagctcataggagctggctttcatccatggaggtttgggccattttggaagaccttaggaagactaggcaactgttagagaacgcttcggacggagtctccggtttttggagattctggttcgctagtgaattagctagggtagtttttaggataaaacaggactataaacaagaatttgaaaagttgttggtagattgcccaggactttttgaagctcttaatttgggccatcaggttcactttaaagaaaaagttttatcagttttagacttttcaaccccaggtagaactgctgctgctgtggcttttcttacttttatattagataaatggatcccgcagactcatttcagcaggggatacgttttggatttcatagccacagcattgtggagaacatggaaggttcgcaagatgaggacaatcttaggttactggccagtgcagcctttgggtgtagcgggaatcctgaggcatccaccggtcatgccagcggttctggaggaggaacagcaagaggacaacccgagagccggcctggaccctccagtggaggaggcggagtagctgacttgtctcctgaactgcaacgggtgcttactggatctacgtccactggacgggataggggcgttaagagggagagggcatctagtggtactgatgctagatctgagttggctttaagtttaatgagtcgcagacgtcctgaaaccatttggtggcatgaggttcagaaagagggaagggatgaagtttctgtattgcaggagaaatattcactggaacaggtgaaaacatgttggttggagcctgaggatgattgggaggtggccattaaaaattatgccaagatagctttgaggcctgataaacagtataagattactagacggattaatatccggaatgcttgttacatatctggaaatggggctgaggtggtaatagatactcaagacaaggcagttattagatgctgcatgatggatatgtggcctggggtagtcggtatggaagcagtaacttttgtaaatgttaagtttaggggagatggttataatggaatagtgtttatggccaataccaaacttatattgcatggttgtagcttttttggtttcaacaatacctgtgtagatgcctggggacaggttagtgtacggggatgtagtttctatgcgtgttggattgccacagctggcagaaccaagagtcaattgtctctgaagaaatgcatatttcaaagatgtaacctgggcattctgaatgaaggcgaagcaagggtccgccactgcgcttctacagatactggatgttttattttgattaagggaaatgccagcgtaaagcataacatgatttgcggtgcttccgatgagaggccttatcaaatgctcacttgtgctggtgggcattgtaatatgctggctactgtgcatattgtttcccatcaacgcaaaaaatggcctgtttttgatcacaatgtgatgacgaagtgtaccatgcatgcaggtgggcgtagaggaatgtttatgccttaccagtgtaacatgaatcatgtgaaagtgttgttggaaccagatgccttttccagaatgagcctaacaggaatttttgacatgaacatgcaaatctggaagatcctgaggtatgatgatacgagatcgagggtacgcgcatgcgaatgcggaggcaagcatgccaggttccagccggtgtgtgtagatgtgactgaagatctcagaccggatcatttggttattgcccgcactggagcagagttcggatccagtggagaagaaactgactaaggtgagtattgggaaaactttggggtgggattttcagatggacagattgagtaaaaatttgttttttctgtcttgcagctgtcatgagtggaaacgcttcttttaaggggggagtcttcagcccttatctgacagggcgtctcccatcctgggcaggagttcgtcagaatgttatgggatctactgtggatggaagacccgtccaacccgccaattcttcaacgctgacctatgctactttaagttcttcacctttggacgcagctgcagctgccgccgccgcttctgttgccgctaacactgtgcttggaatgggttactatggaagcatcatggctaattccacttcctctaataacccttctaccctgactcaggacaagttacttgtccttttggcccagctggaggctttgacccaacgtctgggtgaactttctcagcaggtggtcgagttgcgagtacaaactgagtctgctgtcggcacggcaaagtctaaataaaaaaatcccagaatcaatgaataaataaacaagcttgttgttgatttaaaatcaagtgtttttatttcatttttcgcgcacggtatgccctagaccaccgatctctatcattgagaactcggtggattttttccaggatcctatagaggtgggattgaatgtttagatacatgggcattaggccgtctttggggtggagatagctccattgaagggattcatgctccggggtagtgttgtaaatcacccagtcataacaaggtcgcagtgcatggtgttgcacaatatcttttagaagtaggctgattgccacagataagcccttggtgtaggtgtttacaaaccggttgagctgggatgggtgcattcggggtgaaattatgtgcattttggattggatttttaagttggcaatattgccgccaagatcccgtcttgggttcatgttatgaaggaccaccaagacggtgtatccggtacatttaggaaatttatcgtgcagcttggatggaaaagcgtggaaaaatttggagacacccttgtgtcctccaagattttccatgcactcatccatgataatagcaatggggccgtgggcagcggcgcgggcaaacacgttccgtgggtctgacacatcatagttatgttcctgagttaaatcatcataagccattttaatgaatttggggcggagagtaccagattggggtatgaatgttccttcgggccccggagcatagttcccctcacagatttgcatttcccaagctttcagttccgagggtggaatcatgtccacctggggggctatgaaaaacaccgtttctggggcgggggtgattaattgtgatgatagcaaatttctgagcaattgagatttgccacatccggtggggccataaatgattccgattacgggttgcaggtggtagtttagggaacggcaactgccgtcttctcgaagcaagggggccacctcgttcatcatttcccttacatgcatattttcccgcaccaaatccattaggaggcgctctcctcctagtgatagaagttcttgtagtgaggaaaagtttttcagcggtttcagaccgtcagccatgggcattttggagagagtttgctgcaaaagttctagtctgttccacagttcagtgatgtgttctatggcatctcgatccagcagacctcctcgtttcgcgggtttggacggctcctggaatagggtatgagacgatgggcgtccagcgctgccagggttcggtccttccagggtctcagtgttcgagtcagggttgtttccgtcacagtgaaggggtgtgcgcctgcttgggcgcttgccagggtgcgcttcagactcatcctgctggtcgaaaacttctgtcgcttggcgccctgtatgtcggccaagtagcagtttaccatgagttcgtagttgagcgcctcggctgcgtggcctttggcgcggagcttacctttggaagttttcttgcataccgggcagtataggcatttcagcgcatacaacttgggcgcaaggaaaacggattctggggagtatgcatctgcgccgcaggaggcgcaaacagtttcacattccaccagccaggttaaatccggttcattggggtcaaaaacaagttttccgccatattttttgatgcgtttcttacctttggtctccatgagttcgtgtcctcgttgagtgacaaacaggctgtccgtgtccccgtagactgattttacaggcctcttctccagtggagtgcctcggtcttcttcgtacaggaactctgaccactctgatacaaaggcgcgcgtccaggccagcacaaaggaggctatgtgggaggggtagcgatcgttgtcaaccagggggtccaccttttccaaagtatgcaaacacatgtcaccctcttcaacatccaggaatgtgattggcttgtaggtgtatttcacgtgacctggggtccccgctgggggggtataaaagggggcggttctttgctcttcctcactgtcttccggatcgctgtccaggaacgtcagctgttggggtaggtattccctctcgaaggcgggcatgacctctgcactcaggttgtcagtttctaagaacgaggaggatttgatattgacagtgccggttgagatgcctttcatgaggttttcgtccatctggtcagaaaacacaatttttttattgtcaagtttggtggcaaatgatccatacagggcgttggataaaagtttggcaatggatcgcatggtttggttcttttccttgtccgcgcgctctttggcggcgatgttgagttggacatactcgcgtgccaggcacttccattcggggaagatagttgttaattcatctggcacgattctcacttgccaccctcgattatgcaaggtaattaaatccacactggtggccacctcgcctcgaaggggttcattggtccaacagagcctacctcctttcctagaacagaaagggggaagtgggtctagcataagttcatcgggagggtctgcatccatggtaaagattcccggaagtaaatccttatcaaaatagctgatgggagtggggtcatctaaggccatttgccattctcgagctgccagtgcgcgctcatatgggttaaggggactgccccatggcatgggatgggtgagtgcagaggcatacatgccacagatgtcatagacgtagatgggatcctcaaagatgcctatgtaggttggatagcatcgcccccctctgatacttgctcgcacatagtcatatagttcatgtgatggcgctagcagccccggacccaagttggtgcgattgggtttttctgttctgtagacgatctggcgaaagatggcgtgagaattggaagagatggtgggtctttgaaaaatgttgaaatgggcatgaggtagacctacagagtctctgacaaagtgggcataagattcttgaagcttggttaccagttcggcggtgacaagtacgtctagggcgcagtagtcaagtgtttcttgaatgatgtcataacctggttggtttttcttttcccacagttcgcggttgagaaggtattcttcgcgatccttccagtactcttctagcggaaacccgtctttgtctgcacggtaagatcctagcatgtagaactgattaactgccttgtaagggcagcagcccttctctacgggtagagagtatgcttgagcagcttttcgtagcgaagcgtgagtaagggcaaaggtgtctctgaccatgactttgaggaattggtatttgaagtcgatgtcgtcacaggctccctgttcccagagttggaagtctacccgtttcttgtaggcggggttgggcaaagcgaaagtaacatcattgaagagaatcttgccggccctgggcatgaaattgcgagtgatgcgaaaaggctgtggtacttccgctcggttattgataacctgggcagctaggacgatctcgtcgaaaccgttgatgttgtgtcctacgatgtataattctatgaaacgcggcgtgcctctgacgtgaggtagcttactgagctcatcaaaggttaggtctgtggggtcagataaggcgtagtgttcgagagcccattcgtgcaggtgaggattcgctttaaggaaggaggaccagaggtccactgccagtgctgtttgtaactggtcccggtactgacgaaaatgccgtccgactgccattttttctggggtgacgcaatagaaggtttgggggtcctgccgccagcgatcccacttgagttttatggcgaggtcataggcgatgttgacgagccgctggtctccagagagtttcatgaccagcatgaaggggattagctgcttgccaaaggaccccatccaggtgtaggtttccacatcgtaggtgagaaagagcctttctgtgcgaggatgagagccaatcgggaagaactggatctcctgccaccagttggaggaatggctgttgatgtgatggaagtagaactccctgcgacgcgccgagcattcatgcttgtgcttgtacagacggccgcagtagtcgcagcgttgcacgggttgtatctcgtgaatgagttgtacctggcttcccttgacgagaaatttcagtgggaagccgaggcctggcgattgtatctcgtgctttactatgttgtctgcatcggcctgttcatcttctgtctcgatggtggtcatgctgacgagccctcgcgggaggcaagtccagacctcggcgcggcaggggcggagctcgaggacgagagcgcgcaggctggagctgtccagggtcctgagacgctgcggactcaggttagtaggcagtgtcaggagattaacttgcatgatcttttggagggcgtgcgggaggttcagatagtacttgatctcaacgggtccgttggtggagatgtcgatggcttgcagggttccgtgtcccttgggcgctaccaccgtgcccttgtttttcattttggacggcggtggctctgttgcttcttgcatgtttagaagcggtgtcgagggcgcgcaccgggcggcaggggcggctcgggacccggcggcatggctggcagtggtacgtcggcgccgcgcgcgggtaggttctggtactgcgccctgagaagactcgcatgcgcgacgacgcggcggttgacatcctggatctgacgcctctgggtgaaagctaccggccccgtgagcttgaacctgaaagagagttcaacagaatcaatctcggtatcgttgacggcggcttgcctaaggatttcttgcacgtcaccagagttgtcctggtaggcgatctccgccatgaactgctcgatctcttcctcttgaagatctccgcggcccgctctctcgacggtggccgcgaggtcgttggagatgcgcccaatgagttgagagaatgcattcatgcccgcctcgttccagacgcggctgtagaccacggcccccacgggatctctcgcgcgcatgaccacctgggcgaggttgagctccacgtggcgggtgaagaccgcatagttgcataggcgctggaaaaggtagttgagtgtggtggcgatgtgctcggtgacgaagaaatacatgatccatcgtctcagcggcatctcgctgacatcgcccagagcttccaagcgctccatggcctcgtagaagtccacggcaaaattaaaaaactgggagtttcgcgcggacacggtcaactcctcttccagaagacggataagttcggcgatggtggtgcgcacctcgcgctcgaaagcccctgggatttcttcctcaatctcttcttcttccactaacatctcttcctcttcaggtggggctgcaggaggagggggaacgcggcgacgccggcggcgcacgggcagacggtcgatgaatctttcaatgacctctccgcggcggcggcgcatggtttcagtgacggcgcggccgttctcgcgcggtcgcagagtaaaaacaccgccgcgcatctccttaaagtggtgactgggaggttctccgtttgggagggagagggcgctgattatacattttattaattggcccgtagggactgcacgcagagatctgatcgtgtcaagatccacgggatctgaaaacctttcgacgaaagcgtctaaccagtcacagtcacaaggtaggctgagtacggcttcttgtgggcgggggtggttatgtgttcggtctgggtcttctgtttcttcttcatctcgggaaggtgagacgatgctgctggtgatgaaattaaagtaggcagttctaagacggcggatggtggcgaggagcaccaggtctttgggtccggcttgctggatacgcaggcgattggccattccccaagcattatcctgacatctagcaagatctttgtagtagtcttgcatgagccgttctacgggcacttcttcctcacccgttctgccatgcatacgtgtgagtccaaatccgcgcattggttgtaccagtgccaagtcagctacgactctttcggcgaggatggcttgctgtacttgggtaagggtggcttgaaagtcatcaaaatccacaaagcggtggtaagctcctgtattaatggtgtaagcacagttggccatgactgaccagttaactgtctggtgaccagggcgcacgagctcggtgtatttaaggcgcgaataggcgcgggtgtcaaagatgtaatcgttgcaggtgcgcaccagatactggtaccctataagaaaatgcggcggtggttggcggtagagaggccatcgttctgtagctggagcgccaggggcgaggtcttccaacataaggcggtgatagccgtagatgtacctggacatccaggtgattcctgcggcggtagtagaagcccgaggaaactcgcgtacgcggttccaaatgttgcgtagcggcatgaagtagttcattgtaggcacggtttgaccagtgaggcgcgcgcagtcattgatgctctatagacacggagaaaatgaaagcgttcagcgactcgactccgtagcctggaggaacgtgaacgggttgggtcgcggtgtaccccggttcgagacttgtactcgagccggccggagccgcggctaacgtggtattggcactcccgtctcgacccagcctacaaaaatccaggatacggaatcgagtcgttttgctggtttccgaatggcagggaagtgagtcctattttttttttttgccgctcagatgcatcccgtgctgcgacagatgcgcccccaacaacagcccccctcgcagcagcagcagcagcaatcacaaaaggctgtccctgcaactactgcaactgccgccgtgagcggtgcgggacagcccgcctatgatctggacttggaagagggcgaaggactggcacgtctaggtgcgccttcacccgagcggcatccgcgagttcaactgaaaaaagattctcgcgaggcgtatgtgccccaacagaacctatttagagacagaagcggcgaggagccggaggagatgcgagcttcccgctttaacgcgggtcgtgagctgcgtcacggtttggaccgaagacgagtgttgcgggacgaggatttcgaagttgatgaaatgacagggatcagtcctgccagggcacacgtggctgcagccaaccttgtatcggcttacgagcagacagtaaaggaagagcgtaacttccaaaagtcttttaataatcatgtgcgaaccctgattgcccgcgaagaagttacccttggtttgatgcatttgtgggatttgatggaagctatcattcagaaccctactagcaaacctctgaccgcccagctgtttctggtggtgcaacacagcagagacaatgaggctttcagagaggcgctgctgaacatcaccgaacccgaggggagatggttgtatgatcttatcaacattctacagagtatcatagtgcaggagcggagcctgggcctggccgagaaggtggctgccatcaattactcggttttgagcttgggaaaatattacgctcgcaaaatctacaagactccatacgttcccatagacaaggaggtgaagatagatgggttctacatgcgcatgacgctcaaggtcttgaccctgagcgatgatcttggggtgtatcgcaatgacagaatgcatcgcgcggttagcgccagcaggaggcgcgagttaagcgacagggaactgatgcacagtttgcaaagagctctgactggagctggaaccgagggtgagaattacttcgacatgggagctgacttgcagtggcagcctagtcgcagggctctgagcgccgcgacggcaggatgtgagcttccttacatagaagaggcggatgaaggcgaggaggaagagggcgagtacttggaagactgatggcacaacccgtgttttttgctagatggaacagcaagcaccggatcccgcaatgcgggcggcgctgcagagccagccgtccggcattaactcctcggacgattggacccaggccatgcaacgtatcatggcgttgacgactcgcaaccccgaagcctttagacagcaaccccaggccaaccgtctatcggccatcatggaagctgtagtgccttcccgctctaatcccactcatgagaaggtcctggccatcgtgaacgcgttggtggagaacaaagctattcgtccagatgaggccggactggtatacaacgctctcttagaacgcgtggctcgctacaacagtagcaatgtgcaaaccaatttggaccgtatgataacagatgtacgcgaagccgtgtctcagcgcgaaaggttccagcgtgatgccaacctgggttcgctggtggcgttaaatgctttcttgagtactcagcctgctaatgtgccgcgtggtcaacaggattatactaactttttaagtgctttgagactgatggtatcagaagtacctcagagcgaagtgtatcagtccggtcctgattacttctttcagactagcagacagggcttgcagacggtaaatctgagccaagcttttaaaaaccttaaaggtttgtggggagtgcatgccccggtaggagaaagagcaaccgtgtctagcttgttaactccgaactcccgcctattattactgttggtagctcctttcaccgacagcggtagcatcgaccgtaattcctatttgggttacctactaaacctgtatcgcgaagccatagggcaaagtcaggtggacgagcagacctatcaagaaattacccaagtcagtcgcgctttgggacaggaagacactggcagtttggaagccactctgaacttcttgcttaccaatcggtctcaaaagatccctcctcaatatgctcttactgcggaggaggagaggatccttagatatgtgcagcagagcgtgggattgtttctgatgcaagagggggcaactccgactgcagcactggacatgacagcgcgaaatatggagcccagcatgtatgccagtaaccgacctttcattaacaaactgctggactacttgcacagagctgccgctatgaactctgattatttcaccaatgccatcttaaacccgcactggctgcccccacctggtttctacacgggcgaatatgacatgcccgaccctaatgacggatttctgtgggacgacgtggacagcgatgttttttcacctctttctgatcatcgcacgtggaaaaaggaaggcggcgatagaatgcattcttctgcatcgctgtccggggtcatgggtgctaccgcggctgagcccgagtctgcaagtccttttcctagtctacccttttctctacacagtgtacgtagcagcgaagtgggtagaataagtcgcccgagtttaatgggcgaagaggagtatctaaacgattccttgctcagaccggcaagagaaaaaaatttcccaaacaatggaatagaaagtttggtggataaaatgagtagatggaagacttatgctcaggatcacagagacgagcctgggatcatggggattacaagtagagcgagccgtagacgccagcgccatgacagacagaggggtcttgtgtgggacgatgaggattcggccgatgatagcagcgtgctggacttgggtgggagaggaaggggcaacccgtttgctcatttgcgccctcgcttgggtggtatgttgtaaaaaaaaataaaaaaaaaactcaccaaggccatggcgacgagcgtacgttcgttcttctttattatctgtgtctagtataatgaggcgagtcgtgctaggcggagcggtggtgtatccggagggtcctcctccttcgtacgagagcgtgatgcagcagcagcaggcgacggcggtgatgcaatccccactggaggctccctttgtgcctccgcgatacctggcacctacggagggcagaaacagcattcgttattcggaactggcacctcagtacgataccaccaggttgtatctggtggacaacaagtcggcggacattgcttctctgaactatcagaatgaccacagcaacttcttgaccacggtggtgcaaaacaatgactttacccctacggaagccagcacccagaccattaactttgatgaacgatcgcggtggggcggtcagctaaagaccatcatgcatactaacatgccaaacgtgaacgagtatatgtttagtaacaagttcaaagcgcgtgtgatggtgtccagaaaacctcccgacggtgctgcagttggggatacttatgatcacaagcaggatattttgaaatatgagtggttcgagtttactttgccagaaggcaacttttcagttactatgactattgatttgatgaacaatgccatcatagataattacttgaaagtgggtagacagaatggagtgcttgaaagtgacattggtgttaagttcgacaccaggaacttcaagctgggatgggatcccgaaaccaagttgatcatgcctggagtgtatacgtatgaagccttccatcctgacattgtcttactgcctggctgcggagtggattttaccgagagtcgtttgagcaaccttcttggtatcagaaaaaaacagccatttcaagagggttttaagattttgtatgaagatttagaaggtggtaatattccggccctcttggatgtagatgcctatgagaacagtaagaaagaacaaaaagccaaaatagaagctgctacagctgctgcagaagctaaggcaaacatagttgccagcgactctacaagggttgctaacgctggagaggtcagaggagacaattttgcgccaacacctgttccgactgcagaatcattattggccgatgtgtctgaaggaacggacgtgaaactcactattcaacctgtagaaaaagatagtaagaatagaagctataatgtgttggaagacaaaatcaacacagcctatcgcagttggtatctttcgtacaattatggcgatcccgaaaaaggagtgcgttcctggacattgctcaccacctcagatgtcacctgcggagcagagcaggtctactggtcgcttccagacatgatgaaggatcctgtcactttccgctccactagacaagtcagtaactaccctgtggtgggtgcagagcttatgcccgtcttctcaaagagcttctacaacgaacaagctgtgtactcccagcagctccgccagtccacctcgcttacgcacgtcttcaaccgctttcctgagaaccagattttaatccgtccgccggcgcccaccattaccaccgtcagtgaaaacgttcctgctctcacagatcacgggaccctgccgttgcgcagcagtatccggggagtccaacgtgtgaccgttactgacgccagacgccgcacctgtccctacgtgtacaaggcactgggcatagtcgcaccgcgcgtcctttcaagccgcactttctaaaaaaaaaaaaaatgtccattcttatctcgcccagtaataacaccggttggggtctgcgcgctccaagcaagatgtacggaggcgcacgcaaacgttctacccaacatcctgtccgtgttcgcggacattttcgcgctccatggggcgccctcaagggccgcactcgcgttcgaaccaccgtcgatgatgtaatcgatcaggtggttgccgacgcccgtaattatactcctactgcgcctacatctactgtggatgcagttattgacagtgtagtggctgacgctcgcaactatgctcgacgtaagagccggcgaaggcgcattgccagacgccaccgagctaccactgccatgcgagccgcaagagctctgctacgaagagctagacgcgtggggcgaagagccatgcttagggcggccagacgtgcagcttcgggcgccagcgccggcaggtcccgcaggcaagcagccgctgtcgcagcggcgactattgccgacatggcccaatcgcgaagaggcaatgtatactgggtgcgtgacgctgccaccggtcaacgtgtacccgtgcgcacccgtccccctcgcacttagaagatactgagcagtctccgatgttgtgtcccagcggcgaggatgtccaagcgcaaatacaaggaagaaatgctgcaggttatcgcacctgaagtctacggccaaccgttgaaggatgaaaaaaaaccccgcaaaatcaagcgggttaaaaaggacaaaaaagaagaggaagatggcgatgatgggctggcggagtttgtgcgcgagtttgccccacggcgacgcgtgcaatggcgtgggcgcaaagttcgacatgtgttgagacctggaacttcggtggtctttacacccggcgagcgttcaagcgctacttttaagcgttcctatgatgaggtgtacggggatgatgatattcttgagcaggcggctgaccgattaggcgagtttgcttatggcaagcgtagtagaataacttccaaggatgagacagtgtcgatacccttggatcatggaaatcccacccctagtcttaaaccggtcactttgcagcaagtgttacccgtaactccgcgaacaggtgttaaacgcgaaggtgaagatttgtatcccactatgcaactgatggtacccaaacgccagaagttggaggacgttttggagaaagtaaaagtggatccagatattcaacctgaggttaaagtgagacccattaagcaggtagcgcctggtctgggggtacaaactgtagacattaagattcccactgaaagtatggaagtgcaaactgaacccgcaaagcctactgccacctccactgaagtgcaaacggatccatggatgcccatgcctattacaactgacgccgccggtcccactcgaagatcccgacgaaagtacggtccagcaagtctgttgatgcccaattatgttgtacacccatctattattcctactcctggttaccgaggcactcgctactatcgcagccgaaacagtacctcccgccgtcgccgcaagacacctgcaaatcgcagtcgtcgccgtagacgcacaagcaaaccgactcccggcgccctggtgcggcaagtgtaccgcaatggtagtgcggaacctttgacactgccgcgtgcgcgttaccatccgagtatcatcacttaatcaatgttgccgctgcctccttgcagatatggccctcacttgtcgccttcgcgttcccatcactggttaccgaggaagaaactcgcgccgtagaagagggatgttgggacgcggaatgcgacgctacaggcgacggcgtgctatccgcaagcaattgcggggtggttttttaccagccttaattccaattatcgctgctgcaattggcgcgataccaggcatagcttccgtggcggttcaggcctcgcaacgacattgacattggaaaaaaacgtataaataaaaaaaaaaaaatacaatggactctgacactcctggtcctgtgactatgttttcttagagatggaagacatcaatttttcatccttggctccgcgacacggcacgaagccgtacatgggcacctggagcgacatcggcacgagccaactgaacgggggcgccttcaattggagcagtatctggagcgggcttaaaaattttggctcaaccataaaaacatacgggaacaaagcttggaacagcagtacaggacaggcgcttagaaataaacttaaagaccagaacttccaacaaaaagtagtcgatgggatagcttccggcatcaatggagtggtagatttggctaaccaggctgtgcagaaaaagataaacagtcgtttggacccgccgccagcaaccccaggtgaaatgcaagtggaggaagaaattcctccgccagaaaaacgaggcgacaagcgtccgcgtcccgatttggaagagacgctggtgacgcgcgtagatgaaccgccttcttatgaggaagcaacgaagcttggaatgcccaccactagaccgatagccccaatggccaccggggtgatgaaaccttctcagttgcatcgacccgtcaccttggatttgccccctccccctgctgctactgctgtacccgcttctaagcctgtcgctgccccgaaaccagtcgccgtagccaggtcacgtcccgggggcgctcctcgtccaaatgcgcactggcaaaatactctgaacagcatcgtgggtctaggcgtgcaaagtgtaaaacgccgtcgctgcttttaattaaatatggagtagcgcttaacttgcctatctgtgtatatgtgtcattacacgccgtcacagcagcagaggaaaaaaggaagaggtcgtgcgtcgacgctgagttactttcaagatggccaccccatcgatgctgccccaatgggcatacatgcacatcgccggacaggatgcttcggagtacctgagtccgggtctggtgcagttcgcccgcgccacagacacctacttcaatctgggaaataagtttagaaatcccaccgtagcgccgacccacgatgtgaccaccgaccgtagccagcggctcatgttgcgcttcgtgcccgttgaccgggaggacaatacatactcttacaaagtgcggtacaccctggccgtgggcgacaacagagtgctggatatggccagcacgttctttgacattaggggtgtgttggacagaggtcccagtttcaaaccctattctggtacggcttacaactccctggctcctaaaggcgctccaaatacatctcagtggattgcagaaggtgtaaaaaatacaactggtgaggaacacgtaacagaagaggaaaccaatactactacttacacttttggcaatgctcctgtaaaagctgaagctgaaattacaaaagaaggactcccagtaggtttggaagtttcagatgaagaaagtaaaccgatttatgctgataaaacatatcagccagaacctcagctgggagatgaaacttggactgaccttgatggaaaaaccgaaaagtatggaggcagggctctcaaacccgatactaagatgaaaccatgctacgggtcctttgccaaacctactaatgtgaaaggcggtcaggcaaaacaaaaaacaacggagcagccaaatcagaaagtcgaatatgatatcgacatggagttttttgatgcggcatcgcagaaaacaaacttaagtcctaaaattgtcatgtatgcagaaaatgtaaatttggaaactccagacactcatgtagtgtacaaacctggaacagaagacacaagttccgaagctaatttgggacaacaatctatgcccaacagacccaactacattggcttcagagataactttattggacttatgtactataacagtactggtaacatgggggtgctggctggtcaagcgtctcagttaaatgcagtggttgacttgcaggacagaaacacagaactttcttaccaactcttgcttgactctctgggcgacagaaccagatactttagcatgtggaatcaggctgtggacagttatgatcctgatgtacgtgttattgaaaatcatggtgtggaagatgaacttcccaactactgttttccactggacggcataggtgttccaacaaccagttacaaatcaatagttccaaatggagacaatgcgcctaattggaaggaacctgaagtaaatggaacaagtgagatcggacagggtaatttgtttgccatggaaattaaccttcaagccaatctatggcgaagtttcctttattccaatgtggctctatatctcccagactcgtacaaatacaccccgtccaatgtcactcttccagaaaacaaaaacacctacgactacatgaacgggcgggtggtgccgccatctctagtagacacctatgtgaacattggtgccaggtggtctctggatgccatggacaatgtcaacccattcaaccaccaccgtaacgctggcttgcgttaccgatccatgcttctgggtaacggacgttatgtgcctttccacatacaagtgcctcaaaaattcttcgctgttaaaaacctgctgcttctcccaggctcctacacttatgagtggaactttaggaaggatgtgaacatggttctacagagttccctcggtaacgacctgcgggtagatggcgccagcatcagtttcacgagcatcaacctctatgctacttttttccccatggctcacaacaccgcttccacccttgaagccatgctgcggaatgacaccaatgatcagtcattcaacgactacctatctgcagctaacatgctctaccccattcctgccaatgcaaccaatattcccatttccattccttctcgcaactgggcggctttcagaggctggtcatttaccagactgaaaaccaaagaaactccctctttggggtctggatttgacccctactttgtctattctggttctattccctacctggatggtaccttctacctgaaccacacttttaagaaggtttccatcatgtttgactcttcagtgagctggcctggaaatgacaggttactatctcctaacgaatttgaaataaagcgcactgtggatggcgaaggctacaacgtagcccaatgcaacatgaccaaagactggttcttggtacagatgctcgccaactacaacatcggctatcagggcttctacattccagaaggatacaaagatcgcatgtattcatttttcagaaacttccagcccatgagcaggcaggtggttgatgaggtcaattacaaagacttcaaggccgtcgccataccctaccaacacaacaactctggctttgtgggttacatggctccgaccatgcgccaaggtcaaccctatcccgctaactatccctatccactcattggaacaactgccgtaaatagtgttacgcagaaaaagttcttgtgtgacagaaccatgtggcgcataccgttctcgagcaacttcatgtctatgggggcccttacagacttgggacagaatatgctctatgccaactcagctcatgctctggacatgacctttgaggtggatcccatggatgagcccaccctgctttatcttctcttcgaagttttcgacgtggtcagagtgcatcagccacaccgcggcatcatcgaggcagtctacctgcgtacaccgttctcggccggtaacgctaccacgtaagaagcttcttgcttcttgcaaatagcagctgcaaccatggcctgcggatcccaaaacggctccagcgagcaagagctcagagccattgtccaagacctgggttgcggaccctattttttgggaacctacgataagcgcttcccggggttcatggcccccgataagctcgcctgtgccattgtaaatacggccggacgtgagacggggggagagcactggttggctttcggttggaacccacgttctaacacctgctacctttttgatccttttggattctcggatgatcgtctcaaacagatttaccagtttgaatatgagggtctcctgcgccgcagcgctcttgctaccaaggaccgctgtattacgctggaaaaatctacccagaccgtgcagggtccccgttctgccgcctgcggacttttctgctgcatgttccttcacgcctttgtgcactggcctgaccgtcccatggacggaaaccccaccatgaaattgctaactggagtgccaaacaacatgcttcattctcctaaagtccagcccaccctgtgtgacaatcaaaaagcactctaccattttcttaatacccattcgccttattttcgctcccatcgtacacacatcgaaagggccactgcgttcgaccgtatggatgttcaataatgactcatgtaaacaacgtgttcaataaacatcactttatttttttacatgtatcaaggctctgcattacttatttatttacaagtcgaatgggttctgacgagaatcagaatgacccgcaggcagtgatacgttgcggaactgatacttgggttgccacttgaattcgggaatcaccaacttgggaaccggtatatcgggcaggatgtcactccacagctttctggtcagctgcaaagctccaagcaggtcaggagccgaaatcttgaaatcacaattaggaccagtgctttgagcgcgagagttgcggtacaccggattgcagcactgaaacaccatcagcgacggatgtctcacgcttgccagcacggtgggatctgcaatcatgcccacatccagatcttcagcattggcaatgctgaacggggtcatcttgcaggtctgcctacccatggcgggcacccaattaggcttgtggttgcaatcgcagtgcagggggatcagtatcatcttggcctgatcctgtctgattcctggatacacggctctcatgaaagcatcatattgcttgaaagcctgctgggctttactaccctcggtataaaacatcccgcaggacctgctcgaaaactggttagctgcacagccggcatcattcacacagcagcgggcgtcattgttagctatttgcaccacacttctgccccagcggttttgggtgattttggttcgctcgggattctcctttaaggctcgttgtccgttctcgctggccacatccatctcgataatctgctccttctgaatcataatattgccatgcaggcacttcagcttgccctcataatcattgcagccatgaggccacaacgcacagcctgtacattcccaattatggtgggcgatctgagaaaaagaatgtatcattccctgcagaaatcttcccatcatcgtgctcagtgtcttgtgactagtgaaagttaactggatgcctcggtgctcctcgtttacgtactggtgacagatgcgcttgtattgttcgtgttgctcaggcattagtttaaaagaggttctaagttcgttatccagcctgtacttctccatcagcagacacatcacttccatgcctttctcccaagcagacaccaggggcaagctaatcggattcttaacagtgcaggcagcagctcctttagccagagggtcatctttagcgatcttctcaatgcttcttttgccatccttctcaacgatgcgcacgggcgggtagctgaaacccactgctacaagttgcgcctcttctctttcttcttcgctgtcttgactgatgtcttgcatggggatatgtttggtcttccttggcttctttttggggggtatcggaggaggaggactgtcgctccgttccggagacagggaggattgtgacgtttcgctcaccattaccaactgactgtcggtagaagaacctgaccccacacggcgacaggtgtttctcttcgggggcagaggtggaggcgattgcgaagggctgcggtccgacctggaaggcggatgactggcagaaccccttccgcgttcgggggtgtgctccctgtggcggtcgcttaactgatttccttcgcggctggccattgtgttctcctaggcagagaaacaacagacatggaaactcagccattgctgtcaacatcgccacgagtgccatcacatctcgtcctcagcgacgaggaaaaggagcagagcttaagcattccaccgcccagtcctgccaccacctctaccctagaagataaggaggtcgacgcatctcatgacatgcagaataaaaaagcgaaagagtctgagacagacatcgagcaagacccgggctatgtgacaccggtggaacacgaggaagagttgaaacgctttctagagagagaggatgaaaactgcccaaaacaacgagcagataactatcaccaagatgctggaaatagggatcagaacaccgactacctcatagggcttgacggggaagacgcgctccttaaacatctagcaagacagtcgctcatagtcaaggatgcattattggacagaactgaagtgcccatcagtgtggaagagctcagccgcgcctacgagcttaacctcttttcacctcgtactccccccaaacgtcagccaaacggcacctgcgagccaaatcctcgcttaaacttttatccagcttttgctgtgccagaagtactggctacctatcacatcttttttaaaaatcaaaaaattccagtctcctgccgcgctaatcgcacccgcgccgatgccctactcaatctgggacctggttcacgcttacctgatatagcttccttggaagaggttccaaagatcttcgagggtctgggcaataatgagactcgggccgcaaatgctctgcaaaagggagaaaatggcatggatgagcatcacagcgttctggtggaattggaaggcgataatgccagactcgcagtactcaagcgaagcatcgaggtcacacacttcgcatatcccgctgtcaacctgccccctaaagtcatgacggcggtcatggaccagttactcattaagcgcgcaagtcccctttcagaagacatgcatgacccagatgcctgtgatgagggtaaaccagtggtcagtgatgagcagctaacccgatggctgggcaccgactctcccagggatttggaagagcgtcgcaagcttatgatggccgtggtgctggttaccgtagaactagagtgtctccgacgtttctttaccgattcagaaaccttgcgcaaactcgaagagaatctgcactacacttttagacacggctttgtgcggcaggcatgcaagatatctaacgtggaactcaccaacctggtttcctacatgggtattctgcatgagaatcgcctaggacaaagcgtgctgcacagcaccctgaagggggaagcccgccgtgattacatccgcgattgtgtctatctgtacctgtgccacacgtggcaaaccggcatgggtgtatggcagcaatgtttagaagaacagaacttgaaagagcttgacaagctcttacagaaatctcttaaggttctgtggacagggttcgacgagcgcaccgtcgcttccgacctggcagacctcatcttcccagagcgtctcagggttactttgcgaaacggattgcctgactttatgagccagagcatgcttaacaattttcgctctttcatcctggaacgctccggtatcctgcccgccacctgctgcgcactgccctccgactttgtgcctctcacctaccgcgagtgccccccgccgctatggagtcactgctacctgttccgtctggccaactatctctcctaccactcggatgtgatcgaggatgtgagcggagacggcttgctggagtgtcactgccgctgcaatctgtgcacgccccaccggtccctagcttgcaacccccagttgatgagcgaaacccagataataggcacctttgaattgcaaggccccagcagccaaggcgatgggtcttctcctgggcaaagtttaaaactgaccccgggactgtggacctccgcctacttgcgcaagtttgctccggaagattaccacccctatgaaatcaagttctatgaggaccaatcacagcctccaaaggccgaactttcggcctgcgtcatcacccagggggcaattctggcccaattgcaagccatccaaaaatcccgccaagaatttctactgaaaaagggtaagggggtctaccttgacccccagaccggcgaggaactcaacacaaggttccctcaggatgtcccaacgacgagaaaacaagaagttgaaggtgcagccgccgcccccagaagatatggaggaagattgggacagtcaggcagaggaggcggaggaggacagtctggaggacagtctggaggaagacagtttggaggaggaaaacgaggaggcagaggaggtggaagaagtaaccgccgacaaacagttatcctcggctgcggagacaagcaacagcgctaccatctccgctccgagtcgaggaacccggcggcgtcccagcagtagatgggacgagaccggacgcttcccgaacccaaccagcgcttccaagaccggtaagaaggatcggcagggatacaagtcctggcgggggcataagaatgccatcatctcctgcttgcatgagtgcgggggcaacatatccttcacgcggcgctacttgctattccaccatggggtgaactttccgcgcaatgttttgcattactaccgtcacctccacagcccctactatagccagcaaatcccggcagtctcgacagataaagacagcggcggcgacctccaacagaaaaccagcagcggcagttagaaaatacacaacaagtgcagcaacaggaggattaaagattacagccaacgagccagcgcaaacccgagagttaagaaatcggatctttccaaccctgtatgccatcttccagcagagtcggggtcaagagcaggaactgaaaataaaaaaccgatctctgcgttcgctcaccagaagttgtttgtatcacaagagcgaagatcaacttcagcgcactctcgaggacgccgaggctctcttcaacaagtactgcgcgctgactcttaaagagtaggcagcgaccgcgcttattcaaaaaaggcgggaattacatcatcctcgacatgagtaaagaaattcccacgccttacatgtggagttatcaaccccaaatgggattggcggcaggcgcctcccaggactactccacccgcatgaattggctcagcgccgggccttctatgatttctcgagttaatgatatacgcgcctaccgaaaccaaatacttttggaacagtcagctcttaccaccacgccccgccaacaccttaatcccagaaattggcccgccgccctagtgtaccaggaaagtcccgctcccaccactgtattacttcctcgagacgcccaggccgaagtccaaatgactaatgcaggtgcgcagttagctggcggctccaccctatgtcgtcacaggcctcggcataatataaaacgcctgatgatcagaggccgaggtatccagctcaacgacgagtcggtgagctctccgcttggtctacgaccagacggaatctttcagattgccggctgcgggagatcttccttcacccctcgtcaggctgttctgactttggaaagttcgtcttcgcaaccccgctcgggcggaatcgggaccgttcaatttgtggaggagtttactccctctgtctacttcaaccccttctccggatctcctgggcattacccggacgagttcataccgaacttcgacgcgattagcgagtcagtggacggctacgattgatgtctggtgacgcggctgagctatctcggctgcgacatctagaccactgccgccgctttcgctgctttgcccgggaactcattgagttcatctacttcgaactccccaaggatcaccctcaaggtccggcccacggagtgcggatttctatcgaaggcaaaatagactctcgcctgcaacgaattttctcccagcggcccgtgctgatcgagcgagaccagggaaacaccacggtttccatctactgcatttgtaatcaccccggattgcatgaaagcctttgctgtcttatgtgtactgagtttaataaaaactgaattaagactctcctacggactgccgcttcttcaacccggattttacaaccagaagaacgaaacttttcctgtcgtccaggactctgttaacttcacctttcctactcacaaactagaagctcaacgactacaccgcttttccagaagcattttccctactaatactactttcaaaaccggaggtgagctccaaggtcttcctacagaaaacccttgggtggaagcgggccttgtagtgctaggaattcttgcgggtgggcttgtgattattctttgctacctatacacaccttgcttcactttcttagtggtgttgtggtattggtttaaaaaatggggcccatactagtcttgcttgttttactttcgcttttggaaccgggttctgccaattacgatccatgtctagacttcgacccagaaaactgcacacttacttttgcacccgacacaagccgcatctgtggagttcatcgcctctcttacgaacttggcccccaacgacaaaaatttacctgcatggtgggaatcaaccccatagttatcacccagcaaagtggagatactaagggttgcattcactgctcctgcgattccatcgagtgcacctacaccctgctgaagaccctatgcggcctaagagacctgctaccaatgaattaaaaaatgattaataaaaaatcacttacttgaaatcagcaataaggtctctgttgaaattttctcccagcagcacctcacttccctcttcccaactctggtattctaaaccccgttcagcggcatactttctccatactttaaaggggatgtcaaattttagctcctctcctgtacccacaatcttcatgtctttcttcccagatgaccaagagagtccggctcagtgactccttcaaccctgtctacccctatgaagatgaaagcacctcccaacacccctttataaacccagggtttatttccccaaatggcttcacacaaagcccaaacggagttcttactttaaaatgtttaaccccactaacaaccacaggcggatctctacagctaaaagtgggagggggacttacagtggatgacaccaacggttttttgaaagaaaacataagtgccaccacaccactcgttaagactggtcactctataggtttaccactaggagccggattgggaacgaatgaaaataaactttgtatcaaattaggacaaggacttacattcaattcaaacaacatttgcattgatgacaatattaacaccttatggacaggagtcaaccccaccgaagccaactgtcaaatcatgaactccagtgaatctaatgattgcaaattaattctaacactagttaaaactggagcactagtcactgcatttgtttatgttataggagtatctaacaattttaatatgctaactacacacagaaatataaattttactgcagagctgtttttcgattctactggtaatttactaactagactctcatccctcaaaactccacttaatcataaatcaggacaaaacatggctactggtgccattactaatgctaaaggtttcatgcccagcacgactgcctatcctttcaatgataattctagagaaaaagaaaactacatttacggaacttgttactacacagctagtgatcgcactgcttttcccattgacatatctgtcatgcttaaccgaagagcaataaatgacgagacatcatattgtattcgtataacttggtcctggaacacaggagatgccccagaggtgcaaacctctgctacaaccctagtcacctccccatttaccttttactacatcagagaagacgactgacaaataaagtttgcgatcgccaggcccaccatggactggacctggcgcatcctgttcttggtggcagctgctacgggagctcattccaactgggtgaatgtaataagtgatttgaaaaaaattgaagatcttattcaatctatgcatattgatgctactttatatacggaaagtgatgttcaccccagttgcaaagtaacagcaatgaagtgctttctcttggagttacaagttatttcacttgagtccggagatgcaagtattcatgatacagtagaaaatctgatcatcctagcaaacaacagtttgtcttctaatgggaatgtaacagaatctggatgcaaagaatgtgaggaactggaggaaaaaaatattaaagaatttttgcagagttttgtacatattgtccaaatgttcatcaacacttctggaagcggagctactaacttcagcctgctgaagcaggctggagacgtggaggagaaccctggacctaagaaaagtggtgttcttttcctcttgggcatcatcttgctggttctgattggagtgcaaggaaccccagtagtgagaaagggtcgctgttcctgcatcagcaccaaccaagggactatccacctacaatccttgaaagaccttaaacaatttgccccaagcccttcctgcgagaaaattgaaatcattgctacactgaagaatggagttcaaacatgtctaaacccagattcagcagatgtgaaggaactgattaaaaagtgggagaaacaggtcagccaaaagaaaaagcaaaagaatgggaaaaaacatcaaaaaaagaaagttctgaaagttcgaaaatctcaacgttctcgtcaaaagaagactacaggaagcggagtgaaacagactttgaattttgaccttctcaagttggcgggagacgtggagtccaaccctggacctatgtgtcaccagcagttggtcatctcttggttttccctggtttttctggcatctcccctcgtggccatatgggaactgaagaaagatgtttatgtcgtagaattggattggtatccggatgcccctggagaaatggtggtcctcacctgtgacacccctgaagaagatggtatcacctggaccttggaccagagcagtgaggtcttaggctctggcaaaaccctgaccatccaagtcaaagagtttggagatgctggccagtacacctgtcacaaaggaggcgaggttctaagccattcgctcctgctgcttcacaaaaaggaagatggaatttggtccactgatattttaaaggaccagaaagaacccaaaaataagacctttctaagatgcgaggccaagaattattctggacgtttcacctgctggtggctgacgacaatcagtactgatttgacattcagtgtcaaaagcagcagaggctcttctgacccccaaggggtgacgtgcggagctgctacactctctgcagagagagtcagaggggacaacaaggagtatgagtactcagtggagtgccaggaggacagtgcctgcccagctgctgaggagagtctgcccattgaggtcatggtggatgccgttcacaagctcaagtatgaaaactacaccagcagcttcttcatcagggacatcatcaaacctgacccacccaagaacttgcagctgaagccattaaagaattctcggcaggtggaggtcagctgggagtaccctgacacctggagtactccacattcctacttctccctgacattctgcgttcaggtccagggcaagagcaagagagaaaagaaagatagagtcttcacggacaagacctcagccacggtcatctgccgcaaaaatgccagcattagcgtgcgggcccaggaccgctactatagctcatcttggagcgaatgggcatctgtgccctgcagtggagggggcggcagcgggggaggcggcagcggcggcgggggatcgagaaacctccccgtggccactccagacccaggaatgttcccatgccttcaccactcccaaaacctgctgagggccgtcagcaacatgctccagaaggccagacaaactctagaattttacccttgcacttctgaagagattgatcatgaagatatcacaaaagataaaaccagcacagtggaggcctgtttaccattggaattaaccaagaatgagagttgcctaaattccagagagacctctttcataactaatgggagttgcctggcctccagaaagacctcttttatgatggccctgtgccttagtagtatttatgaagacttgaagatgtaccaggtggagttcaagaccatgaatgcaaagcttctgatggatcctaagaggcagatctttctagatcaaaacatgctggcagttattgatgagctgatgcaggccctgaatttcaacagtgagactgtgccacaaaaatcctcccttgaagaaccggatttttataaaactaaaatcaagctctgcatacttcttcatgctttcagaattcgggcagtgactattgatagagtgatgagctatctgaatgcttcctaagctagcttgactgactgagatacagcgtaccttcagctcacagacatgataagatacattgatgagtttggacaaaccacaactagaatgcagtgaaaaaaatgctttatttgtgaaatttgtgatgctattgctttatttgtaaccattataagctgcaataaacaagttaacaacaacaattgcattcattttatgtttcaggttcagggggaggtgtgggaggttttttaaagcaagtaaaacctctacaaatgtggtagtcgtcagctatcctgcaggaacttgtttatttgaaaatcaattcacaaaatccgagtagttattttgcctcccccttcccatttaacagaatacaccaatctctccccacgcacagctttaaacatttggataccattagatatagacatggttttagattccacattccaaacagtttcagagcgagccaatctggggtcagtgatagataaaaatccatcgggatagtcttttaaagcgctttcacagtccaactgctgcggatgcgactccggagtctggatcacggtcatctggaagaagaacgatgggaatcataatccgaaaacggtatcggacgattgtgtctcatcaaacccacaagcagccgctgtctgcgtcgctccgtgcgactgctgtttatgggatcagggtccacagtgtcctgaagcatgattttaatagcccttaacatcaactttctggtgcgatgcgcgcagcaacgcattctgatttcactcaaatctttgcagtaggtacaacacattattacaatattgtttaataaaccataattaaaagcgctccagccaaaactcatatctgatataatcgcccctgcatgaccatcataccaaagtttaatataaattaaatgacgttccctcaaaaacacactacccacatacatgatctcttttggcatgtgcatattaacaatctgtctgtaccatggacaacgttggttaatcatgcaacccaatataaccttccggaaccacactgccaacaccgctcccccagccatgcattgaagtgaaccctgctgattacaatgacaatgaagaacccaattctctcgaccgtgaatcacttgagaatgaaaaatatctatagtggcacaacatagacataaatgcatgcatcttctcataatttttaactcctcaggatttagaaacatatcccagggaataggaagctcttgcagaacagtaaagctggcagaacaaggaagaccacgaacacaacttacactatgcatagtcatagtatcacaatctggcaacagcgggtggtcttcagtcatagaagctcgggtttcattttcctcacaacgtggtaactgggctctggtgtaagggtgatgtctggcgcatgatgtcgagcgtgcgcgcaaccttgtcataatggagttgcttcctgacattctcgtattttgtatagcaaaacgcggccctggcagaacacactcttcttcgccttctatcctgccgcttagcgtgttccgtgtgatagttcaagtacaaccacactcttaagttggtcaaaagaatgctggcttcagttgtaatcaaaactccatcgcatctaatcgttctgaggaaatcatccaagcaatgcaactggattgtgtttcaagcaggagaggagagggaagagacggaagaaccatgttaatttttattccaaacgatctcgcagtacttcaaattgtagatcgcgcagatggcatctctcgcccccactgtgttggtgaaaaagcacagctagatcaaaagaaatgcgattttcaaggtgctcaacggtggcttccagcaaagcctccacgcgcacatccaagaacaaaagaataccaaaagaaggagcattttctaactcctcaatcatcatattacattcctgcaccattcccagataattttcagctttccagccttgaattattcgtgtcagttcttgtggtaaatccaatccacacattacaaacaggtcccggagggcgccctccaccaccattcttaaacacaccctcataatgacaaaatatcttgctcctgtgtcacctgtagcgaattgagaatggcaacatcaattgacatgcccttggctctaagttcttctttaagttctagttgtaaaaactctctcatattatcaccaaactgcttagccagaagccccccgggaacaagagcaggggacgctacagtgcagtacaagcgcagacctccccaattggctccagcaaaaacaagattggaataagcatattgggaaccgccagtaatatcatcgaagttgctggaaatataatcaggcagagtttcttgtaaaaattgaataaaagaaaaatttgccaaaaaaacattcaaaacctctgggatgcaaatgcaataggttaccgcgctgcgctccaacattgttagttttgaattagtctgcaaaaataaaaaaaaaaacaagcgtcatatcatagtagcctgacgaacagatggataaatcagtctttccatcacaagacaagccacagggtctccagctcgaccctcgtaaaacctgtcatcatgattaaacaacagcaccgaaagttcctcgcggtgaccagcatgaataattcttgatgaagcatacaatccagacatgttagcatcagttaacgagaaaaaacagccaacatagcctttgggtataattatgcttaatcgtaagtatagcaaagccacccctcgcggatacaaagtaaaaggcacaggagaataaaaaatataattatttctctgctgctgttcaggcaacgtcgcccccggtccctctaaatacacatacaaagcctcatcagccatggcttaccagacaaagtacagcgggcacacaaagcacaagctctaaagtgactctccaacctctccacaatatatatatacacaagccctaaactgacgtaatgggagtaaagtgtaaaaaatcccgccaaacccaacacacaccccgaaactgcgtcaccagggaaaagtacagtttcacttccgcaatcccaacaggcgtaacttcctctttctcacggtacgtgatatcccactaacttgcaacgtcattttcccacggtcgcaccgccccttttagccgttaaccccacagccaatcaccacacgatccacactttttaaaatcacctcatttacatattggcaccattccatctataaggtatattatatagataga

SEQ ID NO: 109 - DNA, 36253 bp, Artificial Sequence
  Genome sequence of NG-768 virus
tctatctatataatataccttatagatggaatggtgccaatatgtaaatgaggtgattttaaaaagtgtggatcgtgtggtgattggctgtggggttaacggctaaaaggggcggtgcgaccgtgggaaaatgacgttttgtgggggtggagtttttttgcaagttgtcgcgggaaatgtgacgcataaaaaggcttttttctcacggaactacttagttttcccacggtatttaacaggaaatgaggtagttttgaccggatgcaagtgaaaattgttgattttcgcgcgaaaactgaatgaggaagtgtttttctgaataatgtggtatttatggcagggtggagtatttgttcagggccaggtagactttgacccattacgtggaggtttcgattaccgtgttttttacctgaatttccgcgtaccgtgtcaaagtcttctgtttttacgtaggtgtcagctgatcgctagggtatttatacctcagggtttgtgtcaagaggccactcttgagtgccagcgagaagagttttctcctctgcgccggcagtttaataataaaaaaatgagagatttgcgatttctgcctcaggaaataatctctgctgagactggaaatgaaatattggagcttgtggtgcacgccctgatgggagacgatccggagccacctgtgcagctttttgagcctcctacgcttcaggaactgtatgatttagaggtagagggatcggaggattctaatgaggaagctgtaaatggcttttttaccgattctatgcttttagctgctaatgaagggttagaattagatccgcctttggacacttttgatactccaggggtaattgtggaaagcggtacaggtgtaagaaaattacctgatttgagttccgtggactgtgatttgcactgctatgaagacgggtttcctccgagtgatgaggaggaccatgaaaaggagcagtccatgcagactgcagcgggtgagggagtgaaggctgccaatgttggttttcagttggattgcccggagcttcctggacatggctgtaagtcttgtgaatttcacaggaaaaatactggagtaaaggaactgttatgttcgctttgttatatgagaacgcactgccactttatttacagtaagtgtgtttaagttaaaatttaaaggaatatgctgtttttcacatgtatattgagtgtgagttttgtgcttcttattataggtcctgtgtctgatgctgatgaatcaccatctcctgattctactacctcacctcctgagattcaagcacctgttcctgtggacgtgcgcaagcccattcctgtgaagcttaagcctgggaaacgtccagcagtggaaaaacttgaggacttgttacagggtggggacggacctttggacttgagtacacggaaacgtccaagacaataagtgttccatatccgtgtttacttaaggtgacgtcaatatttgtgtgacagtgcaatgtaataaaaatatgttaactgttcactggtttttattgctttttgggcggggactcaggtatataagtagaagcagacctgtgtggttagctcataggagctggctttcatccatggaggtttgggccattttggaagaccttaggaagactaggcaactgttagagaacgcttcggacggagtctccggtttttggagattctggttcgctagtgaattagctagggtagtttttaggataaaacaggactataaacaagaatttgaaaagttgttggtagattgcccaggactttttgaagctcttaatttgggccatcaggttcactttaaagaaaaagttttatcagttttagacttttcaaccccaggtagaactgctgctgctgtggcttttcttacttttatattagataaatggatcccgcagactcatttcagcaggggatacgttttggatttcatagccacagcattgtggagaacatggaaggttcgcaagatgaggacaatcttaggttactggccagtgcagcctttgggtgtagcgggaatcctgaggcatccaccggtcatgccagcggttctggaggaggaacagcaagaggacaacccgagagccggcctggaccctccagtggaggaggcggagtagctgacttgtctcctgaactgcaacgggtgcttactggatctacgtccactggacgggataggggcgttaagagggagagggcatctagtggtactgatgctagatctgagttggctttaagtttaatgagtcgcagacgtcctgaaaccatttggtggcatgaggttcagaaagagggaagggatgaagtttctgtattgcaggagaaatattcactggaacaggtgaaaacatgttggttggagcctgaggatgattgggaggtggccattaaaaattatgccaagatagctttgaggcctgataaacagtataagattactagacggattaatatccggaatgcttgttacatatctggaaatggggctgaggtggtaatagatactcaagacaaggcagttattagatgctgcatgatggatatgtggcctggggtagtcggtatggaagcagtaacttttgtaaatgttaagtttaggggagatggttataatggaatagtgtttatggccaataccaaacttatattgcatggttgtagcttttttggtttcaacaatacctgtgtagatgcctggggacaggttagtgtacggggatgtagtttctatgcgtgttggattgccacagctggcagaaccaagagtcaattgtctctgaagaaatgcatatttcaaagatgtaacctgggcattctgaatgaaggcgaagcaagggtccgccactgcgcttctacagatactggatgttttattttgattaagggaaatgccagcgtaaagcataacatgatttgcggtgcttccgatgagaggccttatcaaatgctcacttgtgctggtgggcattgtaatatgctggctactgtgcatattgtttcccatcaacgcaaaaaatggcctgtttttgatcacaatgtgatgacgaagtgtaccatgcatgcaggtgggcgtagaggaatgtttatgccttaccagtgtaacatgaatcatgtgaaagtgttgttggaaccagatgccttttccagaatgagcctaacaggaatttttgacatgaacatgcaaatctggaagatcctgaggtatgatgatacgagatcgagggtacgcgcatgcgaatgcggaggcaagcatgccaggttccagccggtgtgtgtagatgtgactgaagatctcagaccggatcatttggttattgcccgcactggagcagagttcggatccagtggagaagaaactgactaaggtgagtattgggaaaactttggggtgggattttcagatggacagattgagtaaaaatttgttttttctgtcttgcagctgtcatgagtggaaacgcttcttttaaggggggagtcttcagcccttatctgacagggcgtctcccatcctgggcaggagttcgtcagaatgttatgggatctactgtggatggaagacccgtccaacccgccaattcttcaacgctgacctatgctactttaagttcttcacctttggacgcagctgcagctgccgccgccgcttctgttgccgctaacactgtgcttggaatgggttactatggaagcatcatggctaattccacttcctctaataacccttctaccctgactcaggacaagttacttgtccttttggcccagctggaggctttgacccaacgtctgggtgaactttctcagcaggtggtcgagttgcgagtacaaactgagtctgctgtcggcacggcaaagtctaaataaaaaaatcccagaatcaatgaataaataaacaagcttgttgttgatttaaaatcaagtgtttttatttcatttttcgcgcacggtatgccctagaccaccgatctctatcattgagaactcggtggattttttccaggatcctatagaggtgggattgaatgtttagatacatgggcattaggccgtctttggggtggagatagctccattgaagggattcatgctccggggtagtgttgtaaatcacccagtcataacaaggtcgcagtgcatggtgttgcacaatatcttttagaagtaggctgattgccacagataagcccttggtgtaggtgtttacaaaccggttgagctgggatgggtgcattcggggtgaaattatgtgcattttggattggatttttaagttggcaatattgccgccaagatcccgtcttgggttcatgttatgaaggaccaccaagacggtgtatccggtacatttaggaaatttatcgtgcagcttggatggaaaagcgtggaaaaatttggagacacccttgtgtcctccaagattttccatgcactcatccatgataatagcaatggggccgtgggcagcggcgcgggcaaacacgttccgtgggtctgacacatcatagttatgttcctgagttaaatcatcataagccattttaatgaatttggggcggagagtaccagattggggtatgaatgttccttcgggccccggagcatagttcccctcacagatttgcatttcccaagctttcagttccgagggtggaatcatgtccacctggggggctatgaaaaacaccgtttctggggcgggggtgattaattgtgatgatagcaaatttctgagcaattgagatttgccacatccggtggggccataaatgattccgattacgggttgcaggtggtagtttagggaacggcaactgccgtcttctcgaagcaagggggccacctcgttcatcatttcccttacatgcatattttcccgcaccaaatccattaggaggcgctctcctcctagtgatagaagttcttgtagtgaggaaaagtttttcagcggtttcagaccgtcagccatgggcattttggagagagtttgctgcaaaagttctagtctgttccacagttcagtgatgtgttctatggcatctcgatccagcagacctcctcgtttcgcgggtttggacggctcctggaatagggtatgagacgatgggcgtccagcgctgccagggttcggtccttccagggtctcagtgttcgagtcagggttgtttccgtcacagtgaaggggtgtgcgcctgcttgggcgcttgccagggtgcgcttcagactcatcctgctggtcgaaaacttctgtcgcttggcgccctgtatgtcggccaagtagcagtttaccatgagttcgtagttgagcgcctcggctgcgtggcctttggcgcggagcttacctttggaagttttcttgcataccgggcagtataggcatttcagcgcatacaacttgggcgcaaggaaaacggattctggggagtatgcatctgcgccgcaggaggcgcaaacagtttcacattccaccagccaggttaaatccggttcattggggtcaaaaacaagttttccgccatattttttgatgcgtttcttacctttggtctccatgagttcgtgtcctcgttgagtgacaaacaggctgtccgtgtccccgtagactgattttacaggcctcttctccagtggagtgcctcggtcttcttcgtacaggaactctgaccactctgatacaaaggcgcgcgtccaggccagcacaaaggaggctatgtgggaggggtagcgatcgttgtcaaccagggggtccaccttttccaaagtatgcaaacacatgtcaccctcttcaacatccaggaatgtgattggcttgtaggtgtatttcacgtgacctggggtccccgctgggggggtataaaagggggcggttctttgctcttcctcactgtcttccggatcgctgtccaggaacgtcagctgttggggtaggtattccctctcgaaggcgggcatgacctctgcactcaggttgtcagtttctaagaacgaggaggatttgatattgacagtgccggttgagatgcctttcatgaggttttcgtccatctggtcagaaaacacaatttttttattgtcaagtttggtggcaaatgatccatacagggcgttggataaaagtttggcaatggatcgcatggtttggttcttttccttgtccgcgcgctctttggcggcgatgttgagttggacatactcgcgtgccaggcacttccattcggggaagatagttgttaattcatctggcacgattctcacttgccaccctcgattatgcaaggtaattaaatccacactggtggccacctcgcctcgaaggggttcattggtccaacagagcctacctcctttcctagaacagaaagggggaagtgggtctagcataagttcatcgggagggtctgcatccatggtaaagattcccggaagtaaatccttatcaaaatagctgatgggagtggggtcatctaaggccatttgccattctcgagctgccagtgcgcgctcatatgggttaaggggactgccccatggcatgggatgggtgagtgcagaggcatacatgccacagatgtcatagacgtagatgggatcctcaaagatgcctatgtaggttggatagcatcgcccccctctgatacttgctcgcacatagtcatatagttcatgtgatggcgctagcagccccggacccaagttggtgcgattgggtttttctgttctgtagacgatctggcgaaagatggcgtgagaattggaagagatggtgggtctttgaaaaatgttgaaatgggcatgaggtagacctacagagtctctgacaaagtgggcataagattcttgaagcttggttaccagttcggcggtgacaagtacgtctagggcgcagtagtcaagtgtttcttgaatgatgtcataacctggttggtttttcttttcccacagttcgcggttgagaaggtattcttcgcgatccttccagtactcttctagcggaaacccgtctttgtctgcacggtaagatcctagcatgtagaactgattaactgccttgtaagggcagcagcccttctctacgggtagagagtatgcttgagcagcttttcgtagcgaagcgtgagtaagggcaaaggtgtctctgaccatgactttgaggaattggtatttgaagtcgatgtcgtcacaggctccctgttcccagagttggaagtctacccgtttcttgtaggcggggttgggcaaagcgaaagtaacatcattgaagagaatcttgccggccctgggcatgaaattgcgagtgatgcgaaaaggctgtggtacttccgctcggttattgataacctgggcagctaggacgatctcgtcgaaaccgttgatgttgtgtcctacgatgtataattctatgaaacgcggcgtgcctctgacgtgaggtagcttactgagctcatcaaaggttaggtctgtggggtcagataaggcgtagtgttcgagagcccattcgtgcaggtgaggattcgctttaaggaaggaggaccagaggtccactgccagtgctgtttgtaactggtcccggtactgacgaaaatgccgtccgactgccattttttctggggtgacgcaatagaaggtttgggggtcctgccgccagcgatcccacttgagttttatggcgaggtcataggcgatgttgacgagccgctggtctccagagagtttcatgaccagcatgaaggggattagctgcttgccaaaggaccccatccaggtgtaggtttccacatcgtaggtgagaaagagcctttctgtgcgaggatgagagccaatcgggaagaactggatctcctgccaccagttggaggaatggctgttgatgtgatggaagtagaactccctgcgacgcgccgagcattcatgcttgtgcttgtacagacggccgcagtagtcgcagcgttgcacgggttgtatctcgtgaatgagttgtacctggcttcccttgacgagaaatttcagtgggaagccgaggcctggcgattgtatctcgtgctttactatgttgtctgcatcggcctgttcatcttctgtctcgatggtggtcatgctgacgagccctcgcgggaggcaagtccagacctcggcgcggcaggggcggagctcgaggacgagagcgcgcaggctggagctgtccagggtcctgagacgctgcggactcaggttagtaggcagtgtcaggagattaacttgcatgatcttttggagggcgtgcgggaggttcagatagtacttgatctcaacgggtccgttggtggagatgtcgatggcttgcagggttccgtgtcccttgggcgctaccaccgtgcccttgtttttcattttggacggcggtggctctgttgcttcttgcatgtttagaagcggtgtcgagggcgcgcaccgggcggcaggggcggctcgggacccggcggcatggctggcagtggtacgtcggcgccgcgcgcgggtaggttctggtactgcgccctgagaagactcgcatgcgcgacgacgcggcggttgacatcctggatctgacgcctctgggtgaaagctaccggccccgtgagcttgaacctgaaagagagttcaacagaatcaatctcggtatcgttgacggcggcttgcctaaggatttcttgcacgtcaccagagttgtcctggtaggcgatctccgccatgaactgctcgatctcttcctcttgaagatctccgcggcccgctctctcgacggtggccgcgaggtcgttggagatgcgcccaatgagttgagagaatgcattcatgcccgcctcgttccagacgcggctgtagaccacggcccccacgggatctctcgcgcgcatgaccacctgggcgaggttgagctccacgtggcgggtgaagaccgcatagttgcataggcgctggaaaaggtagttgagtgtggtggcgatgtgctcggtgacgaagaaatacatgatccatcgtctcagcggcatctcgctgacatcgcccagagcttccaagcgctccatggcctcgtagaagtccacggcaaaattaaaaaactgggagtttcgcgcggacacggtcaactcctcttccagaagacggataagttcggcgatggtggtgcgcacctcgcgctcgaaagcccctgggatttcttcctcaatctcttcttcttccactaacatctcttcctcttcaggtggggctgcaggaggagggggaacgcggcgacgccggcggcgcacgggcagacggtcgatgaatctttcaatgacctctccgcggcggcggcgcatggtttcagtgacggcgcggccgttctcgcgcggtcgcagagtaaaaacaccgccgcgcatctccttaaagtggtgactgggaggttctccgtttgggagggagagggcgctgattatacattttattaattggcccgtagggactgcacgcagagatctgatcgtgtcaagatccacgggatctgaaaacctttcgacgaaagcgtctaaccagtcacagtcacaaggtaggctgagtacggcttcttgtgggcgggggtggttatgtgttcggtctgggtcttctgtttcttcttcatctcgggaaggtgagacgatgctgctggtgatgaaattaaagtaggcagttctaagacggcggatggtggcgaggagcaccaggtctttgggtccggcttgctggatacgcaggcgattggccattccccaagcattatcctgacatctagcaagatctttgtagtagtcttgcatgagccgttctacgggcacttcttcctcacccgttctgccatgcatacgtgtgagtccaaatccgcgcattggttgtaccagtgccaagtcagctacgactctttcggcgaggatggcttgctgtacttgggtaagggtggcttgaaagtcatcaaaatccacaaagcggtggtaagctcctgtattaatggtgtaagcacagttggccatgactgaccagttaactgtctggtgaccagggcgcacgagctcggtgtatttaaggcgcgaataggcgcgggtgtcaaagatgtaatcgttgcaggtgcgcaccagatactggtaccctataagaaaatgcggcggtggttggcggtagagaggccatcgttctgtagctggagcgccaggggcgaggtcttccaacataaggcggtgatagccgtagatgtacctggacatccaggtgattcctgcggcggtagtagaagcccgaggaaactcgcgtacgcggttccaaatgttgcgtagcggcatgaagtagttcattgtaggcacggtttgaccagtgaggcgcgcgcagtcattgatgctctatagacacggagaaaatgaaagcgttcagcgactcgactccgtagcctggaggaacgtgaacgggttgggtcgcggtgtaccccggttcgagacttgtactcgagccggccggagccgcggctaacgtggtattggcactcccgtctcgacccagcctacaaaaatccaggatacggaatcgagtcgttttgctggtttccgaatggcagggaagtgagtcctattttttttttttgccgctcagatgcatcccgtgctgcgacagatgcgcccccaacaacagcccccctcgcagcagcagcagcagcaatcacaaaaggctgtccctgcaactactgcaactgccgccgtgagcggtgcgggacagcccgcctatgatctggacttggaagagggcgaaggactggcacgtctaggtgcgccttcacccgagcggcatccgcgagttcaactgaaaaaagattctcgcgaggcgtatgtgccccaacagaacctatttagagacagaagcggcgaggagccggaggagatgcgagcttcccgctttaacgcgggtcgtgagctgcgtcacggtttggaccgaagacgagtgttgcgggacgaggatttcgaagttgatgaaatgacagggatcagtcctgccagggcacacgtggctgcagccaaccttgtatcggcttacgagcagacagtaaaggaagagcgtaacttccaaaagtcttttaataatcatgtgcgaaccctgattgcccgcgaagaagttacccttggtttgatgcatttgtgggatttgatggaagctatcattcagaaccctactagcaaacctctgaccgcccagctgtttctggtggtgcaacacagcagagacaatgaggctttcagagaggcgctgctgaacatcaccgaacccgaggggagatggttgtatgatcttatcaacattctacagagtatcatagtgcaggagcggagcctgggcctggccgagaaggtggctgccatcaattactcggttttgagcttgggaaaatattacgctcgcaaaatctacaagactccatacgttcccatagacaaggaggtgaagatagatgggttctacatgcgcatgacgctcaaggtcttgaccctgagcgatgatcttggggtgtatcgcaatgacagaatgcatcgcgcggttagcgccagcaggaggcgcgagttaagcgacagggaactgatgcacagtttgcaaagagctctgactggagctggaaccgagggtgagaattacttcgacatgggagctgacttgcagtggcagcctagtcgcagggctctgagcgccgcgacggcaggatgtgagcttccttacatagaagaggcggatgaaggcgaggaggaagagggcgagtacttggaagactgatggcacaacccgtgttttttgctagatggaacagcaagcaccggatcccgcaatgcgggcggcgctgcagagccagccgtccggcattaactcctcggacgattggacccaggccatgcaacgtatcatggcgttgacgactcgcaaccccgaagcctttagacagcaaccccaggccaaccgtctatcggccatcatggaagctgtagtgccttcccgctctaatcccactcatgagaaggtcctggccatcgtgaacgcgttggtggagaacaaagctattcgtccagatgaggccggactggtatacaacgctctcttagaacgcgtggctcgctacaacagtagcaatgtgcaaaccaatttggaccgtatgataacagatgtacgcgaagccgtgtctcagcgcgaaaggttccagcgtgatgccaacctgggttcgctggtggcgttaaatgctttcttgagtactcagcctgctaatgtgccgcgtggtcaacaggattatactaactttttaagtgctttgagactgatggtatcagaagtacctcagagcgaagtgtatcagtccggtcctgattacttctttcagactagcagacagggcttgcagacggtaaatctgagccaagcttttaaaaaccttaaaggtttgtggggagtgcatgccccggtaggagaaagagcaaccgtgtctagcttgttaactccgaactcccgcctattattactgttggtagctcctttcaccgacagcggtagcatcgaccgtaattcctatttgggttacctactaaacctgtatcgcgaagccatagggcaaagtcaggtggacgagcagacctatcaagaaattacccaagtcagtcgcgctttgggacaggaagacactggcagtttggaagccactctgaacttcttgcttaccaatcggtctcaaaagatccctcctcaatatgctcttactgcggaggaggagaggatccttagatatgtgcagcagagcgtgggattgtttctgatgcaagagggggcaactccgactgcagcactggacatgacagcgcgaaatatggagcccagcatgtatgccagtaaccgacctttcattaacaaactgctggactacttgcacagagctgccgctatgaactctgattatttcaccaatgccatcttaaacccgcactggctgcccccacctggtttctacacgggcgaatatgacatgcccgaccctaatgacggatttctgtgggacgacgtggacagcgatgttttttcacctctttctgatcatcgcacgtggaaaaaggaaggcggcgatagaatgcattcttctgcatcgctgtccggggtcatgggtgctaccgcggctgagcccgagtctgcaagtccttttcctagtctacccttttctctacacagtgtacgtagcagcgaagtgggtagaataagtcgcccgagtttaatgggcgaagaggagtatctaaacgattccttgctcagaccggcaagagaaaaaaatttcccaaacaatggaatagaaagtttggtggataaaatgagtagatggaagacttatgctcaggatcacagagacgagcctgggatcatggggattacaagtagagcgagccgtagacgccagcgccatgacagacagaggggtcttgtgtgggacgatgaggattcggccgatgatagcagcgtgctggacttgggtgggagaggaaggggcaacccgtttgctcatttgcgccctcgcttgggtggtatgttgtaaaaaaaaataaaaaaaaaactcaccaaggccatggcgacgagcgtacgttcgttcttctttattatctgtgtctagtataatgaggcgagtcgtgctaggcggagcggtggtgtatccggagggtcctcctccttcgtacgagagcgtgatgcagcagcagcaggcgacggcggtgatgcaatccccactggaggctccctttgtgcctccgcgatacctggcacctacggagggcagaaacagcattcgttattcggaactggcacctcagtacgataccaccaggttgtatctggtggacaacaagtcggcggacattgcttctctgaactatcagaatgaccacagcaacttcttgaccacggtggtgcaaaacaatgactttacccctacggaagccagcacccagaccattaactttgatgaacgatcgcggtggggcggtcagctaaagaccatcatgcatactaacatgccaaacgtgaacgagtatatgtttagtaacaagttcaaagcgcgtgtgatggtgtccagaaaacctcccgacggtgctgcagttggggatacttatgatcacaagcaggatattttgaaatatgagtggttcgagtttactttgccagaaggcaacttttcagttactatgactattgatttgatgaacaatgccatcatagataattacttgaaagtgggtagacagaatggagtgcttgaaagtgacattggtgttaagttcgacaccaggaacttcaagctgggatgggatcccgaaaccaagttgatcatgcctggagtgtatacgtatgaagccttccatcctgacattgtcttactgcctggctgcggagtggattttaccgagagtcgtttgagcaaccttcttggtatcagaaaaaaacagccatttcaagagggttttaagattttgtatgaagatttagaaggtggtaatattccggccctcttggatgtagatgcctatgagaacagtaagaaagaacaaaaagccaaaatagaagctgctacagctgctgcagaagctaaggcaaacatagttgccagcgactctacaagggttgctaacgctggagaggtcagaggagacaattttgcgccaacacctgttccgactgcagaatcattattggccgatgtgtctgaaggaacggacgtgaaactcactattcaacctgtagaaaaagatagtaagaatagaagctataatgtgttggaagacaaaatcaacacagcctatcgcagttggtatctttcgtacaattatggcgatcccgaaaaaggagtgcgttcctggacattgctcaccacctcagatgtcacctgcggagcagagcaggtctactggtcgcttccagacatgatgaaggatcctgtcactttccgctccactagacaagtcagtaactaccctgtggtgggtgcagagcttatgcccgtcttctcaaagagcttctacaacgaacaagctgtgtactcccagcagctccgccagtccacctcgcttacgcacgtcttcaaccgctttcctgagaaccagattttaatccgtccgccggcgcccaccattaccaccgtcagtgaaaacgttcctgctctcacagatcacgggaccctgccgttgcgcagcagtatccggggagtccaacgtgtgaccgttactgacgccagacgccgcacctgtccctacgtgtacaaggcactgggcatagtcgcaccgcgcgtcctttcaagccgcactttctaaaaaaaaaaaaaatgtccattcttatctcgcccagtaataacaccggttggggtctgcgcgctccaagcaagatgtacggaggcgcacgcaaacgttctacccaacatcctgtccgtgttcgcggacattttcgcgctccatggggcgccctcaagggccgcactcgcgttcgaaccaccgtcgatgatgtaatcgatcaggtggttgccgacgcccgtaattatactcctactgcgcctacatctactgtggatgcagttattgacagtgtagtggctgacgctcgcaactatgctcgacgtaagagccggcgaaggcgcattgccagacgccaccgagctaccactgccatgcgagccgcaagagctctgctacgaagagctagacgcgtggggcgaagagccatgcttagggcggccagacgtgcagcttcgggcgccagcgccggcaggtcccgcaggcaagcagccgctgtcgcagcggcgactattgccgacatggcccaatcgcgaagaggcaatgtatactgggtgcgtgacgctgccaccggtcaacgtgtacccgtgcgcacccgtccccctcgcacttagaagatactgagcagtctccgatgttgtgtcccagcggcgaggatgtccaagcgcaaatacaaggaagaaatgctgcaggttatcgcacctgaagtctacggccaaccgttgaaggatgaaaaaaaaccccgcaaaatcaagcgggttaaaaaggacaaaaaagaagaggaagatggcgatgatgggctggcggagtttgtgcgcgagtttgccccacggcgacgcgtgcaatggcgtgggcgcaaagttcgacatgtgttgagacctggaacttcggtggtctttacacccggcgagcgttcaagcgctacttttaagcgttcctatgatgaggtgtacggggatgatgatattcttgagcaggcggctgaccgattaggcgagtttgcttatggcaagcgtagtagaataacttccaaggatgagacagtgtcgatacccttggatcatggaaatcccacccctagtcttaaaccggtcactttgcagcaagtgttacccgtaactccgcgaacaggtgttaaacgcgaaggtgaagatttgtatcccactatgcaactgatggtacccaaacgccagaagttggaggacgttttggagaaagtaaaagtggatccagatattcaacctgaggttaaagtgagacccattaagcaggtagcgcctggtctgggggtacaaactgtagacattaagattcccactgaaagtatggaagtgcaaactgaacccgcaaagcctactgccacctccactgaagtgcaaacggatccatggatgcccatgcctattacaactgacgccgccggtcccactcgaagatcccgacgaaagtacggtccagcaagtctgttgatgcccaattatgttgtacacccatctattattcctactcctggttaccgaggcactcgctactatcgcagccgaaacagtacctcccgccgtcgccgcaagacacctgcaaatcgcagtcgtcgccgtagacgcacaagcaaaccgactcccggcgccctggtgcggcaagtgtaccgcaatggtagtgcggaacctttgacactgccgcgtgcgcgttaccatccgagtatcatcacttaatcaatgttgccgctgcctccttgcagatatggccctcacttgtcgccttcgcgttcccatcactggttaccgaggaagaaactcgcgccgtagaagagggatgttgggacgcggaatgcgacgctacaggcgacggcgtgctatccgcaagcaattgcggggtggttttttaccagccttaattccaattatcgctgctgcaattggcgcgataccaggcatagcttccgtggcggttcaggcctcgcaacgacattgacattggaaaaaaacgtataaataaaaaaaaaaaaatacaatggactctgacactcctggtcctgtgactatgttttcttagagatggaagacatcaatttttcatccttggctccgcgacacggcacgaagccgtacatgggcacctggagcgacatcggcacgagccaactgaacgggggcgccttcaattggagcagtatctggagcgggcttaaaaattttggctcaaccataaaaacatacgggaacaaagcttggaacagcagtacaggacaggcgcttagaaataaacttaaagaccagaacttccaacaaaaagtagtcgatgggatagcttccggcatcaatggagtggtagatttggctaaccaggctgtgcagaaaaagataaacagtcgtttggacccgccgccagcaaccccaggtgaaatgcaagtggaggaagaaattcctccgccagaaaaacgaggcgacaagcgtccgcgtcccgatttggaagagacgctggtgacgcgcgtagatgaaccgccttcttatgaggaagcaacgaagcttggaatgcccaccactagaccgatagccccaatggccaccggggtgatgaaaccttctcagttgcatcgacccgtcaccttggatttgccccctccccctgctgctactgctgtacccgcttctaagcctgtcgctgccccgaaaccagtcgccgtagccaggtcacgtcccgggggcgctcctcgtccaaatgcgcactggcaaaatactctgaacagcatcgtgggtctaggcgtgcaaagtgtaaaacgccgtcgctgcttttaattaaatatggagtagcgcttaacttgcctatctgtgtatatgtgtcattacacgccgtcacagcagcagaggaaaaaaggaagaggtcgtgcgtcgacgctgagttactttcaagatggccaccccatcgatgctgccccaatgggcatacatgcacatcgccggacaggatgcttcggagtacctgagtccgggtctggtgcagttcgcccgcgccacagacacctacttcaatctgggaaataagtttagaaatcccaccgtagcgccgacccacgatgtgaccaccgaccgtagccagcggctcatgttgcgcttcgtgcccgttgaccgggaggacaatacatactcttacaaagtgcggtacaccctggccgtgggcgacaacagagtgctggatatggccagcacgttctttgacattaggggtgtgttggacagaggtcccagtttcaaaccctattctggtacggcttacaactccctggctcctaaaggcgctccaaatacatctcagtggattgcagaaggtgtaaaaaatacaactggtgaggaacacgtaacagaagaggaaaccaatactactacttacacttttggcaatgctcctgtaaaagctgaagctgaaattacaaaagaaggactcccagtaggtttggaagtttcagatgaagaaagtaaaccgatttatgctgataaaacatatcagccagaacctcagctgggagatgaaacttggactgaccttgatggaaaaaccgaaaagtatggaggcagggctctcaaacccgatactaagatgaaaccatgctacgggtcctttgccaaacctactaatgtgaaaggcggtcaggcaaaacaaaaaacaacggagcagccaaatcagaaagtcgaatatgatatcgacatggagttttttgatgcggcatcgcagaaaacaaacttaagtcctaaaattgtcatgtatgcagaaaatgtaaatttggaaactccagacactcatgtagtgtacaaacctggaacagaagacacaagttccgaagctaatttgggacaacaatctatgcccaacagacccaactacattggcttcagagataactttattggacttatgtactataacagtactggtaacatgggggtgctggctggtcaagcgtctcagttaaatgcagtggttgacttgcaggacagaaacacagaactttcttaccaactcttgcttgactctctgggcgacagaaccagatactttagcatgtggaatcaggctgtggacagttatgatcctgatgtacgtgttattgaaaatcatggtgtggaagatgaacttcccaactactgttttccactggacggcataggtgttccaacaaccagttacaaatcaatagttccaaatggagacaatgcgcctaattggaaggaacctgaagtaaatggaacaagtgagatcggacagggtaatttgtttgccatggaaattaaccttcaagccaatctatggcgaagtttcctttattccaatgtggctctatatctcccagactcgtacaaatacaccccgtccaatgtcactcttccagaaaacaaaaacacctacgactacatgaacgggcgggtggtgccgccatctctagtagacacctatgtgaacattggtgccaggtggtctctggatgccatggacaatgtcaacccattcaaccaccaccgtaacgctggcttgcgttaccgatccatgcttctgggtaacggacgttatgtgcctttccacatacaagtgcctcaaaaattcttcgctgttaaaaacctgctgcttctcccaggctcctacacttatgagtggaactttaggaaggatgtgaacatggttctacagagttccctcggtaacgacctgcgggtagatggcgccagcatcagtttcacgagcatcaacctctatgctacttttttccccatggctcacaacaccgcttccacccttgaagccatgctgcggaatgacaccaatgatcagtcattcaacgactacctatctgcagctaacatgctctaccccattcctgccaatgcaaccaatattcccatttccattccttctcgcaactgggcggctttcagaggctggtcatttaccagactgaaaaccaaagaaactccctctttggggtctggatttgacccctactttgtctattctggttctattccctacctggatggtaccttctacctgaaccacacttttaagaaggtttccatcatgtttgactcttcagtgagctggcctggaaatgacaggttactatctcctaacgaatttgaaataaagcgcactgtggatggcgaaggctacaacgtagcccaatgcaacatgaccaaagactggttcttggtacagatgctcgccaactacaacatcggctatcagggcttctacattccagaaggatacaaagatcgcatgtattcatttttcagaaacttccagcccatgagcaggcaggtggttgatgaggtcaattacaaagacttcaaggccgtcgccataccctaccaacacaacaactctggctttgtgggttacatggctccgaccatgcgccaaggtcaaccctatcccgctaactatccctatccactcattggaacaactgccgtaaatagtgttacgcagaaaaagttcttgtgtgacagaaccatgtggcgcataccgttctcgagcaacttcatgtctatgggggcccttacagacttgggacagaatatgctctatgccaactcagctcatgctctggacatgacctttgaggtggatcccatggatgagcccaccctgctttatcttctcttcgaagttttcgacgtggtcagagtgcatcagccacaccgcggcatcatcgaggcagtctacctgcgtacaccgttctcggccggtaacgctaccacgtaagaagcttcttgcttcttgcaaatagcagctgcaaccatggcctgcggatcccaaaacggctccagcgagcaagagctcagagccattgtccaagacctgggttgcggaccctattttttgggaacctacgataagcgcttcccggggttcatggcccccgataagctcgcctgtgccattgtaaatacggccggacgtgagacggggggagagcactggttggctttcggttggaacccacgttctaacacctgctacctttttgatccttttggattctcggatgatcgtctcaaacagatttaccagtttgaatatgagggtctcctgcgccgcagcgctcttgctaccaaggaccgctgtattacgctggaaaaatctacccagaccgtgcagggtccccgttctgccgcctgcggacttttctgctgcatgttccttcacgcctttgtgcactggcctgaccgtcccatggacggaaaccccaccatgaaattgctaactggagtgccaaacaacatgcttcattctcctaaagtccagcccaccctgtgtgacaatcaaaaagcactctaccattttcttaatacccattcgccttattttcgctcccatcgtacacacatcgaaagggccactgcgttcgaccgtatggatgttcaataatgactcatgtaaacaacgtgttcaataaacatcactttatttttttacatgtatcaaggctctgcattacttatttatttacaagtcgaatgggttctgacgagaatcagaatgacccgcaggcagtgatacgttgcggaactgatacttgggttgccacttgaattcgggaatcaccaacttgggaaccggtatatcgggcaggatgtcactccacagctttctggtcagctgcaaagctccaagcaggtcaggagccgaaatcttgaaatcacaattaggaccagtgctttgagcgcgagagttgcggtacaccggattgcagcactgaaacaccatcagcgacggatgtctcacgcttgccagcacggtgggatctgcaatcatgcccacatccagatcttcagcattggcaatgctgaacggggtcatcttgcaggtctgcctacccatggcgggcacccaattaggcttgtggttgcaatcgcagtgcagggggatcagtatcatcttggcctgatcctgtctgattcctggatacacggctctcatgaaagcatcatattgcttgaaagcctgctgggctttactaccctcggtataaaacatcccgcaggacctgctcgaaaactggttagctgcacagccggcatcattcacacagcagcgggcgtcattgttagctatttgcaccacacttctgccccagcggttttgggtgattttggttcgctcgggattctcctttaaggctcgttgtccgttctcgctggccacatccatctcgataatctgctccttctgaatcataatattgccatgcaggcacttcagcttgccctcataatcattgcagccatgaggccacaacgcacagcctgtacattcccaattatggtgggcgatctgagaaaaagaatgtatcattccctgcagaaatcttcccatcatcgtgctcagtgtcttgtgactagtgaaagttaactggatgcctcggtgctcctcgtttacgtactggtgacagatgcgcttgtattgttcgtgttgctcaggcattagtttaaaagaggttctaagttcgttatccagcctgtacttctccatcagcagacacatcacttccatgcctttctcccaagcagacaccaggggcaagctaatcggattcttaacagtgcaggcagcagctcctttagccagagggtcatctttagcgatcttctcaatgcttcttttgccatccttctcaacgatgcgcacgggcgggtagctgaaacccactgctacaagttgcgcctcttctctttcttcttcgctgtcttgactgatgtcttgcatggggatatgtttggtcttccttggcttctttttggggggtatcggaggaggaggactgtcgctccgttccggagacagggaggattgtgacgtttcgctcaccattaccaactgactgtcggtagaagaacctgaccccacacggcgacaggtgtttctcttcgggggcagaggtggaggcgattgcgaagggctgcggtccgacctggaaggcggatgactggcagaaccccttccgcgttcgggggtgtgctccctgtggcggtcgcttaactgatttccttcgcggctggccattgtgttctcctaggcagagaaacaacagacatggaaactcagccattgctgtcaacatcgccacgagtgccatcacatctcgtcctcagcgacgaggaaaaggagcagagcttaagcattccaccgcccagtcctgccaccacctctaccctagaagataaggaggtcgacgcatctcatgacatgcagaataaaaaagcgaaagagtctgagacagacatcgagcaagacccgggctatgtgacaccggtggaacacgaggaagagttgaaacgctttctagagagagaggatgaaaactgcccaaaacaacgagcagataactatcaccaagatgctggaaatagggatcagaacaccgactacctcatagggcttgacggggaagacgcgctccttaaacatctagcaagacagtcgctcatagtcaaggatgcattattggacagaactgaagtgcccatcagtgtggaagagctcagccgcgcctacgagcttaacctcttttcacctcgtactccccccaaacgtcagccaaacggcacctgcgagccaaatcctcgcttaaacttttatccagcttttgctgtgccagaagtactggctacctatcacatcttttttaaaaatcaaaaaattccagtctcctgccgcgctaatcgcacccgcgccgatgccctactcaatctgggacctggttcacgcttacctgatatagcttccttggaagaggttccaaagatcttcgagggtctgggcaataatgagactcgggccgcaaatgctctgcaaaagggagaaaatggcatggatgagcatcacagcgttctggtggaattggaaggcgataatgccagactcgcagtactcaagcgaagcatcgaggtcacacacttcgcatatcccgctgtcaacctgccccctaaagtcatgacggcggtcatggaccagttactcattaagcgcgcaagtcccctttcagaagacatgcatgacccagatgcctgtgatgagggtaaaccagtggtcagtgatgagcagctaacccgatggctgggcaccgactctcccagggatttggaagagcgtcgcaagcttatgatggccgtggtgctggttaccgtagaactagagtgtctccgacgtttctttaccgattcagaaaccttgcgcaaactcgaagagaatctgcactacacttttagacacggctttgtgcggcaggcatgcaagatatctaacgtggaactcaccaacctggtttcctacatgggtattctgcatgagaatcgcctaggacaaagcgtgctgcacagcaccctgaagggggaagcccgccgtgattacatccgcgattgtgtctatctgtacctgtgccacacgtggcaaaccggcatgggtgtatggcagcaatgtttagaagaacagaacttgaaagagcttgacaagctcttacagaaatctcttaaggttctgtggacagggttcgacgagcgcaccgtcgcttccgacctggcagacctcatcttcccagagcgtctcagggttactttgcgaaacggattgcctgactttatgagccagagcatgcttaacaattttcgctctttcatcctggaacgctccggtatcctgcccgccacctgctgcgcactgccctccgactttgtgcctctcacctaccgcgagtgccccccgccgctatggagtcactgctacctgttccgtctggccaactatctctcctaccactcggatgtgatcgaggatgtgagcggagacggcttgctggagtgtcactgccgctgcaatctgtgcacgccccaccggtccctagcttgcaacccccagttgatgagcgaaacccagataataggcacctttgaattgcaaggccccagcagccaaggcgatgggtcttctcctgggcaaagtttaaaactgaccccgggactgtggacctccgcctacttgcgcaagtttgctccggaagattaccacccctatgaaatcaagttctatgaggaccaatcacagcctccaaaggccgaactttcggcctgcgtcatcacccagggggcaattctggcccaattgcaagccatccaaaaatcccgccaagaatttctactgaaaaagggtaagggggtctaccttgacccccagaccggcgaggaactcaacacaaggttccctcaggatgtcccaacgacgagaaaacaagaagttgaaggtgcagccgccgcccccagaagatatggaggaagattgggacagtcaggcagaggaggcggaggaggacagtctggaggacagtctggaggaagacagtttggaggaggaaaacgaggaggcagaggaggtggaagaagtaaccgccgacaaacagttatcctcggctgcggagacaagcaacagcgctaccatctccgctccgagtcgaggaacccggcggcgtcccagcagtagatgggacgagaccggacgcttcccgaacccaaccagcgcttccaagaccggtaagaaggatcggcagggatacaagtcctggcgggggcataagaatgccatcatctcctgcttgcatgagtgcgggggcaacatatccttcacgcggcgctacttgctattccaccatggggtgaactttccgcgcaatgttttgcattactaccgtcacctccacagcccctactatagccagcaaatcccggcagtctcgacagataaagacagcggcggcgacctccaacagaaaaccagcagcggcagttagaaaatacacaacaagtgcagcaacaggaggattaaagattacagccaacgagccagcgcaaacccgagagttaagaaatcggatctttccaaccctgtatgccatcttccagcagagtcggggtcaagagcaggaactgaaaataaaaaaccgatctctgcgttcgctcaccagaagttgtttgtatcacaagagcgaagatcaacttcagcgcactctcgaggacgccgaggctctcttcaacaagtactgcgcgctgactcttaaagagtaggcagcgaccgcgcttattcaaaaaaggcgggaattacatcatcctcgacatgagtaaagaaattcccacgccttacatgtggagttatcaaccccaaatgggattggcggcaggcgcctcccaggactactccacccgcatgaattggctcagcgccgggccttctatgatttctcgagttaatgatatacgcgcctaccgaaaccaaatacttttggaacagtcagctcttaccaccacgccccgccaacaccttaatcccagaaattggcccgccgccctagtgtaccaggaaagtcccgctcccaccactgtattacttcctcgagacgcccaggccgaagtccaaatgactaatgcaggtgcgcagttagctggcggctccaccctatgtcgtcacaggcctcggcataatataaaacgcctgatgatcagaggccgaggtatccagctcaacgacgagtcggtgagctctccgcttggtctacgaccagacggaatctttcagattgccggctgcgggagatcttccttcacccctcgtcaggctgttctgactttggaaagttcgtcttcgcaaccccgctcgggcggaatcgggaccgttcaatttgtggaggagtttactccctctgtctacttcaaccccttctccggatctcctgggcattacccggacgagttcataccgaacttcgacgcgattagcgagtcagtggacggctacgattgatgtctggtgacgcggctgagctatctcggctgcgacatctagaccactgccgccgctttcgctgctttgcccgggaactcattgagttcatctacttcgaactccccaaggatcaccctcaaggtccggcccacggagtgcggatttctatcgaaggcaaaatagactctcgcctgcaacgaattttctcccagcggcccgtgctgatcgagcgagaccagggaaacaccacggtttccatctactgcatttgtaatcaccccggattgcatgaaagcctttgctgtcttatgtgtactgagtttaataaaaactgaattaagactctcctacggactgccgcttcttcaacccggattttacaaccagaagaacgaaacttttcctgtcgtccaggactctgttaacttcacctttcctactcacaaactagaagctcaacgactacaccgcttttccagaagcattttccctactaatactactttcaaaaccggaggtgagctccaaggtcttcctacagaaaacccttgggtggaagcgggccttgtagtgctaggaattcttgcgggtgggcttgtgattattctttgctacctatacacaccttgcttcactttcttagtggtgttgtggtattggtttaaaaaatggggcccatactagtcttgcttgttttactttcgcttttggaaccgggttctgccaattacgatccatgtctagacttcgacccagaaaactgcacacttacttttgcacccgacacaagccgcatctgtggagttcatcgcctctcttacgaacttggcccccaacgacaaaaatttacctgcatggtgggaatcaaccccatagttatcacccagcaaagtggagatactaagggttgcattcactgctcctgcgattccatcgagtgcacctacaccctgctgaagaccctatgcggcctaagagacctgctaccaatgaattaaaaaatgattaataaaaaatcacttacttgaaatcagcaataaggtctctgttgaaattttctcccagcagcacctcacttccctcttcccaactctggtattctaaaccccgttcagcggcatactttctccatactttaaaggggatgtcaaattttagctcctctcctgtacccacaatcttcatgtctttcttcccagatgaccaagagagtccggctcagtgactccttcaaccctgtctacccctatgaagatgaaagcacctcccaacacccctttataaacccagggtttatttccccaaatggcttcacacaaagcccaaacggagttcttactttaaaatgtttaaccccactaacaaccacaggcggatctctacagctaaaagtgggagggggacttacagtggatgacaccaacggttttttgaaagaaaacataagtgccaccacaccactcgttaagactggtcactctataggtttaccactaggagccggattgggaacgaatgaaaataaactttgtatcaaattaggacaaggacttacattcaattcaaacaacatttgcattgatgacaatattaacaccttatggacaggagtcaaccccaccgaagccaactgtcaaatcatgaactccagtgaatctaatgattgcaaattaattctaacactagttaaaactggagcactagtcactgcatttgtttatgttataggagtatctaacaattttaatatgctaactacacacagaaatataaattttactgcagagctgtttttcgattctactggtaatttactaactagactctcatccctcaaaactccacttaatcataaatcaggacaaaacatggctactggtgccattactaatgctaaaggtttcatgcccagcacgactgcctatcctttcaatgataattctagagaaaaagaaaactacatttacggaacttgttactacacagctagtgatcgcactgcttttcccattgacatatctgtcatgcttaaccgaagagcaataaatgacgagacatcatattgtattcgtataacttggtcctggaacacaggagatgccccagaggtgcaaacctctgctacaaccctagtcacctccccatttaccttttactacatcagagaagacgactgacaaataaagtttgcgatcgccaggcccaccatgaagaaaagtggtgttcttttcctcttgggcatcatcttgctggttctgattggagtgcaaggaaccccagtagtgagaaagggtcgctgttcctgcatcagcaccaaccaagggactatccacctacaatccttgaaagaccttaaacaatttgccccaagcccttcctgcgagaaaattgaaatcattgctacactgaagaatggagttcaaacatgtctaaacccagattcagcagatgtgaaggaactgattaaaaagtgggagaaacaggtcagccaaaagaaaaagcaaaagaatgggaaaaaacatcaaaaaaagaaagttctgaaagttcgaaaatctcaacgttctcgtcaaaagaagactacaggaagcggagagggcagaggaagtctgctaacatgcggtgacgtcgaggagaatcctggacctgcccaatctctcgcacttagtctgctcattctcgtgcttgctttcgggattccaagaactcagggaagcgacggcggtgcccaagattgctgtctgaaatatagtcagagaaaaatccctgctaaagtggttcggagttatcgcaaacaagagcccagtttggggtgttcaattcccgcaattctctttttaccacggaaacggtcccaagctgaactgtgcgctgatcctaaagaactgtgggtccaacagctcatgcaacaccttgataaaaccccttctccccaaaagcctgctcaagggtgtagaaaagatagaggagcttctaaaaccggtaaaaagggcaaagggtctaagggatgtaaaagaaccgaacgctcccaaactcccaagggccccggaagcggagctactaacttcagcctgctgaagcaggctggagacgtggaggagaaccctggacctgccttgacctttgctttactggtggccctcctggtgctcagctgcaagtcaagctgctctgtgggctgtgatctgcctcaaacccacagcctgggtagcaggaggaccttgatgctcctggcacagatgaggagaatctctcttttctcctgcttgaaggacagacatgactttggatttccccaggaggagtttggcaaccagttccaaaaggctgaaaccatccctgtcctccatgagatgatccagcagatcttcaatctcttcagcacaaaggactcatctgctgcttgggatgagaccctcctagacaaattctacactgaactctaccagcagctgaatgacctggaagcctgtgtgatacagggggtgggggtgacagagactcccctgatgaaggaggactccattctggctgtgaggaaatacttccaaagaatcactctctatctgaaagagaagaaatacagcccttgtgcctgggaggttgtcagagcagaaatcatgagatctttttctttgtcaacaaacttgcaagaaagtttaagaagtaaggaaggaagcggacagtgtactaattatgctctcttgaaattggctggagatgttgagagcaaccctggacctgactggacctggcgcatcctgttcttggtggcagctgctacgggagctcattccaactgggtgaatgtaataagtgatttgaaaaaaattgaagatcttattcaatctatgcatattgatgctactttatatacggaaagtgatgttcaccccagttgcaaagtaacagcaatgaagtgctttctcttggagttacaagttatttcacttgagtccggagatgcaagtattcatgatacagtagaaaatctgatcatcctagcaaacaacagtttgtcttctaatgggaatgtaacagaatctggatgcaaagaatgtgaggaactggaggaaaaaaatattaaagaatttttgcagagttttgtacatattgtccaaatgttcatcaacacttctggaagcggagtgaaacagactttgaattttgaccttctcaagttggcgggagacgtggagtccaaccctggacctatgtgtcaccagcagttggtcatctcttggttttccctggtttttctggcatctcccctcgtggccatatgggaactgaagaaagatgtttatgtcgtagaattggattggtatccggatgcccctggagaaatggtggtcctcacctgtgacacccctgaagaagatggtatcacctggaccttggaccagagcagtgaggtcttaggctctggcaaaaccctgaccatccaagtcaaagagtttggagatgctggccagtacacctgtcacaaaggaggcgaggttctaagccattcgctcctgctgcttcacaaaaaggaagatggaatttggtccactgatattttaaaggaccagaaagaacccaaaaataagacctttctaagatgcgaggccaagaattattctggacgtttcacctgctggtggctgacgacaatcagtactgatttgacattcagtgtcaaaagcagcagaggctcttctgacccccaaggggtgacgtgcggagctgctacactctctgcagagagagtcagaggggacaacaaggagtatgagtactcagtggagtgccaggaggacagtgcctgcccagctgctgaggagagtctgcccattgaggtcatggtggatgccgttcacaagctcaagtatgaaaactacaccagcagcttcttcatcagggacatcatcaaacctgacccacccaagaacttgcagctgaagccattaaagaattctcggcaggtggaggtcagctgggagtaccctgacacctggagtactccacattcctacttctccctgacattctgcgttcaggtccagggcaagagcaagagagaaaagaaagatagagtcttcacggacaagacctcagccacggtcatctgccgcaaaaatgccagcattagcgtgcgggcccaggaccgctactatagctcatcttggagcgaatgggcatctgtgccctgcagtggagggggcggcagcgggggaggcggcagcggcggcgggggatcgagaaacctccccgtggccactccagacccaggaatgttcccatgccttcaccactcccaaaacctgctgagggccgtcagcaacatgctccagaaggccagacaaactctagaattttacccttgcacttctgaagagattgatcatgaagatatcacaaaagataaaaccagcacagtggaggcctgtttaccattggaattaaccaagaatgagagttgcctaaattccagagagacctctttcataactaatgggagttgcctggcctccagaaagacctcttttatgatggccctgtgccttagtagtatttatgaagacttgaagatgtaccaggtggagttcaagaccatgaatgcaaagcttctgatggatcctaagaggcagatctttctagatcaaaacatgctggcagttattgatgagctgatgcaggccctgaatttcaacagtgagactgtgccacaaaaatcctcccttgaagaaccggatttttataaaactaaaatcaagctctgcatacttcttcatgctttcagaattcgggcagtgactattgatagagtgatgagctatctgaatgcttcctaagctagcttgactgactgagatacagcgtaccttcagctcacagacatgataagatacattgatgagtttggacaaaccacaactagaatgcagtgaaaaaaatgctttatttgtgaaatttgtgatgctattgctttatttgtaaccattataagctgcaataaacaagttaacaacaacaattgcattcattttatgtttcaggttcagggggaggtgtgggaggttttttaaagcaagtaaaacctctacaaatgtggtagtcgtcagctatcctgcaggaacttgtttatttgaaaatcaattcacaaaatccgagtagttattttgcctcccccttcccatttaacagaatacaccaatctctccccacgcacagctttaaacatttggataccattagatatagacatggttttagattccacattccaaacagtttcagagcgagccaatctggggtcagtgatagataaaaatccatcgggatagtcttttaaagcgctttcacagtccaactgctgcggatgcgactccggagtctggatcacggtcatctggaagaagaacgatgggaatcataatccgaaaacggtatcggacgattgtgtctcatcaaacccacaagcagccgctgtctgcgtcgctccgtgcgactgctgtttatgggatcagggtccacagtgtcctgaagcatgattttaatagcccttaacatcaactttctggtgcgatgcgcgcagcaacgcattctgatttcactcaaatctttgcagtaggtacaacacattattacaatattgtttaataaaccataattaaaagcgctccagccaaaactcatatctgatataatcgcccctgcatgaccatcataccaaagtttaatataaattaaatgacgttccctcaaaaacacactacccacatacatgatctcttttggcatgtgcatattaacaatctgtctgtaccatggacaacgttggttaatcatgcaacccaatataaccttccggaaccacactgccaacaccgctcccccagccatgcattgaagtgaaccctgctgattacaatgacaatgaagaacccaattctctcgaccgtgaatcacttgagaatgaaaaatatctatagtggcacaacatagacataaatgcatgcatcttctcataatttttaactcctcaggatttagaaacatatcccagggaataggaagctcttgcagaacagtaaagctggcagaacaaggaagaccacgaacacaacttacactatgcatagtcatagtatcacaatctggcaacagcgggtggtcttcagtcatagaagctcgggtttcattttcctcacaacgtggtaactgggctctggtgtaagggtgatgtctggcgcatgatgtcgagcgtgcgcgcaaccttgtcataatggagttgcttcctgacattctcgtattttgtatagcaaaacgcggccctggcagaacacactcttcttcgccttctatcctgccgcttagcgtgttccgtgtgatagttcaagtacaaccacactcttaagttggtcaaaagaatgctggcttcagttgtaatcaaaactccatcgcatctaatcgttctgaggaaatcatccaagcaatgcaactggattgtgtttcaagcaggagaggagagggaagagacggaagaaccatgttaatttttattccaaacgatctcgcagtacttcaaattgtagatcgcgcagatggcatctctcgcccccactgtgttggtgaaaaagcacagctagatcaaaagaaatgcgattttcaaggtgctcaacggtggcttccagcaaagcctccacgcgcacatccaagaacaaaagaataccaaaagaaggagcattttctaactcctcaatcatcatattacattcctgcaccattcccagataattttcagctttccagccttgaattattcgtgtcagttcttgtggtaaatccaatccacacattacaaacaggtcccggagggcgccctccaccaccattcttaaacacaccctcataatgacaaaatatcttgctcctgtgtcacctgtagcgaattgagaatggcaacatcaattgacatgcccttggctctaagttcttctttaagttctagttgtaaaaactctctcatattatcaccaaactgcttagccagaagccccccgggaacaagagcaggggacgctacagtgcagtacaagcgcagacctccccaattggctccagcaaaaacaagattggaataagcatattgggaaccgccagtaatatcatcgaagttgctggaaatataatcaggcagagtttcttgtaaaaattgaataaaagaaaaatttgccaaaaaaacattcaaaacctctgggatgcaaatgcaataggttaccgcgctgcgctccaacattgttagttttgaattagtctgcaaaaataaaaaaaaaaacaagcgtcatatcatagtagcctgacgaacagatggataaatcagtctttccatcacaagacaagccacagggtctccagctcgaccctcgtaaaacctgtcatcatgattaaacaacagcaccgaaagttcctcgcggtgaccagcatgaataattcttgatgaagcatacaatccagacatgttagcatcagttaacgagaaaaaacagccaacatagcctttgggtataattatgcttaatcgtaagtatagcaaagccacccctcgcggatacaaagtaaaaggcacaggagaataaaaaatataattatttctctgctgctgttcaggcaacgtcgcccccggtccctctaaatacacatacaaagcctcatcagccatggcttaccagacaaagtacagcgggcacacaaagcacaagctctaaagtgactctccaacctctccacaatatatatatacacaagccctaaactgacgtaatgggagtaaagtgtaaaaaatcccgccaaacccaacacacaccccgaaactgcgtcaccagggaaaagtacagtttcacttccgcaatcccaacaggcgtaacttcctctttctcacggtacgtgatatcccactaacttgcaacgtcattttcccacggtcgcaccgccccttttagccgttaaccccacagccaatcaccacacgatccacactttttaaaatcacctcatttacatattggcaccattccatctataaggtatattatatagataga

SEQ ID NO: 110 - DNA, 36157 bp, Artificial Sequence
  Genome sequence of NG-769 virus
tctatctatataatataccttatagatggaatggtgccaatatgtaaatgaggtgattttaaaaagtgtggatcgtgtggtgattggctgtggggttaacggctaaaaggggcggtgcgaccgtgggaaaatgacgttttgtgggggtggagtttttttgcaagttgtcgcgggaaatgtgacgcataaaaaggcttttttctcacggaactacttagttttcccacggtatttaacaggaaatgaggtagttttgaccggatgcaagtgaaaattgttgattttcgcgcgaaaactgaatgaggaagtgtttttctgaataatgtggtatttatggcagggtggagtatttgttcagggccaggtagactttgacccattacgtggaggtttcgattaccgtgttttttacctgaatttccgcgtaccgtgtcaaagtcttctgtttttacgtaggtgtcagctgatcgctagggtatttatacctcagggtttgtgtcaagaggccactcttgagtgccagcgagaagagttttctcctctgcgccggcagtttaataataaaaaaatgagagatttgcgatttctgcctcaggaaataatctctgctgagactggaaatgaaatattggagcttgtggtgcacgccctgatgggagacgatccggagccacctgtgcagctttttgagcctcctacgcttcaggaactgtatgatttagaggtagagggatcggaggattctaatgaggaagctgtaaatggcttttttaccgattctatgcttttagctgctaatgaagggttagaattagatccgcctttggacacttttgatactccaggggtaattgtggaaagcggtacaggtgtaagaaaattacctgatttgagttccgtggactgtgatttgcactgctatgaagacgggtttcctccgagtgatgaggaggaccatgaaaaggagcagtccatgcagactgcagcgggtgagggagtgaaggctgccaatgttggttttcagttggattgcccggagcttcctggacatggctgtaagtcttgtgaatttcacaggaaaaatactggagtaaaggaactgttatgttcgctttgttatatgagaacgcactgccactttatttacagtaagtgtgtttaagttaaaatttaaaggaatatgctgtttttcacatgtatattgagtgtgagttttgtgcttcttattataggtcctgtgtctgatgctgatgaatcaccatctcctgattctactacctcacctcctgagattcaagcacctgttcctgtggacgtgcgcaagcccattcctgtgaagcttaagcctgggaaacgtccagcagtggaaaaacttgaggacttgttacagggtggggacggacctttggacttgagtacacggaaacgtccaagacaataagtgttccatatccgtgtttacttaaggtgacgtcaatatttgtgtgacagtgcaatgtaataaaaatatgttaactgttcactggtttttattgctttttgggcggggactcaggtatataagtagaagcagacctgtgtggttagctcataggagctggctttcatccatggaggtttgggccattttggaagaccttaggaagactaggcaactgttagagaacgcttcggacggagtctccggtttttggagattctggttcgctagtgaattagctagggtagtttttaggataaaacaggactataaacaagaatttgaaaagttgttggtagattgcccaggactttttgaagctcttaatttgggccatcaggttcactttaaagaaaaagttttatcagttttagacttttcaaccccaggtagaactgctgctgctgtggcttttcttacttttatattagataaatggatcccgcagactcatttcagcaggggatacgttttggatttcatagccacagcattgtggagaacatggaaggttcgcaagatgaggacaatcttaggttactggccagtgcagcctttgggtgtagcgggaatcctgaggcatccaccggtcatgccagcggttctggaggaggaacagcaagaggacaacccgagagccggcctggaccctccagtggaggaggcggagtagctgacttgtctcctgaactgcaacgggtgcttactggatctacgtccactggacgggataggggcgttaagagggagagggcatctagtggtactgatgctagatctgagttggctttaagtttaatgagtcgcagacgtcctgaaaccatttggtggcatgaggttcagaaagagggaagggatgaagtttctgtattgcaggagaaatattcactggaacaggtgaaaacatgttggttggagcctgaggatgattgggaggtggccattaaaaattatgccaagatagctttgaggcctgataaacagtataagattactagacggattaatatccggaatgcttgttacatatctggaaatggggctgaggtggtaatagatactcaagacaaggcagttattagatgctgcatgatggatatgtggcctggggtagtcggtatggaagcagtaacttttgtaaatgttaagtttaggggagatggttataatggaatagtgtttatggccaataccaaacttatattgcatggttgtagcttttttggtttcaacaatacctgtgtagatgcctggggacaggttagtgtacggggatgtagtttctatgcgtgttggattgccacagctggcagaaccaagagtcaattgtctctgaagaaatgcatatttcaaagatgtaacctgggcattctgaatgaaggcgaagcaagggtccgccactgcgcttctacagatactggatgttttattttgattaagggaaatgccagcgtaaagcataacatgatttgcggtgcttccgatgagaggccttatcaaatgctcacttgtgctggtgggcattgtaatatgctggctactgtgcatattgtttcccatcaacgcaaaaaatggcctgtttttgatcacaatgtgatgacgaagtgtaccatgcatgcaggtgggcgtagaggaatgtttatgccttaccagtgtaacatgaatcatgtgaaagtgttgttggaaccagatgccttttccagaatgagcctaacaggaatttttgacatgaacatgcaaatctggaagatcctgaggtatgatgatacgagatcgagggtacgcgcatgcgaatgcggaggcaagcatgccaggttccagccggtgtgtgtagatgtgactgaagatctcagaccggatcatttggttattgcccgcactggagcagagttcggatccagtggagaagaaactgactaaggtgagtattgggaaaactttggggtgggattttcagatggacagattgagtaaaaatttgttttttctgtcttgcagctgtcatgagtggaaacgcttcttttaaggggggagtcttcagcccttatctgacagggcgtctcccatcctgggcaggagttcgtcagaatgttatgggatctactgtggatggaagacccgtccaacccgccaattcttcaacgctgacctatgctactttaagttcttcacctttggacgcagctgcagctgccgccgccgcttctgttgccgctaacactgtgcttggaatgggttactatggaagcatcatggctaattccacttcctctaataacccttctaccctgactcaggacaagttacttgtccttttggcccagctggaggctttgacccaacgtctgggtgaactttctcagcaggtggtcgagttgcgagtacaaactgagtctgctgtcggcacggcaaagtctaaataaaaaaatcccagaatcaatgaataaataaacaagcttgttgttgatttaaaatcaagtgtttttatttcatttttcgcgcacggtatgccctagaccaccgatctctatcattgagaactcggtggattttttccaggatcctatagaggtgggattgaatgtttagatacatgggcattaggccgtctttggggtggagatagctccattgaagggattcatgctccggggtagtgttgtaaatcacccagtcataacaaggtcgcagtgcatggtgttgcacaatatcttttagaagtaggctgattgccacagataagcccttggtgtaggtgtttacaaaccggttgagctgggatgggtgcattcggggtgaaattatgtgcattttggattggatttttaagttggcaatattgccgccaagatcccgtcttgggttcatgttatgaaggaccaccaagacggtgtatccggtacatttaggaaatttatcgtgcagcttggatggaaaagcgtggaaaaatttggagacacccttgtgtcctccaagattttccatgcactcatccatgataatagcaatggggccgtgggcagcggcgcgggcaaacacgttccgtgggtctgacacatcatagttatgttcctgagttaaatcatcataagccattttaatgaatttggggcggagagtaccagattggggtatgaatgttccttcgggccccggagcatagttcccctcacagatttgcatttcccaagctttcagttccgagggtggaatcatgtccacctggggggctatgaaaaacaccgtttctggggcgggggtgattaattgtgatgatagcaaatttctgagcaattgagatttgccacatccggtggggccataaatgattccgattacgggttgcaggtggtagtttagggaacggcaactgccgtcttctcgaagcaagggggccacctcgttcatcatttcccttacatgcatattttcccgcaccaaatccattaggaggcgctctcctcctagtgatagaagttcttgtagtgaggaaaagtttttcagcggtttcagaccgtcagccatgggcattttggagagagtttgctgcaaaagttctagtctgttccacagttcagtgatgtgttctatggcatctcgatccagcagacctcctcgtttcgcgggtttggacggctcctggaatagggtatgagacgatgggcgtccagcgctgccagggttcggtccttccagggtctcagtgttcgagtcagggttgtttccgtcacagtgaaggggtgtgcgcctgcttgggcgcttgccagggtgcgcttcagactcatcctgctggtcgaaaacttctgtcgcttggcgccctgtatgtcggccaagtagcagtttaccatgagttcgtagttgagcgcctcggctgcgtggcctttggcgcggagcttacctttggaagttttcttgcataccgggcagtataggcatttcagcgcatacaacttgggcgcaaggaaaacggattctggggagtatgcatctgcgccgcaggaggcgcaaacagtttcacattccaccagccaggttaaatccggttcattggggtcaaaaacaagttttccgccatattttttgatgcgtttcttacctttggtctccatgagttcgtgtcctcgttgagtgacaaacaggctgtccgtgtccccgtagactgattttacaggcctcttctccagtggagtgcctcggtcttcttcgtacaggaactctgaccactctgatacaaaggcgcgcgtccaggccagcacaaaggaggctatgtgggaggggtagcgatcgttgtcaaccagggggtccaccttttccaaagtatgcaaacacatgtcaccctcttcaacatccaggaatgtgattggcttgtaggtgtatttcacgtgacctggggtccccgctgggggggtataaaagggggcggttctttgctcttcctcactgtcttccggatcgctgtccaggaacgtcagctgttggggtaggtattccctctcgaaggcgggcatgacctctgcactcaggttgtcagtttctaagaacgaggaggatttgatattgacagtgccggttgagatgcctttcatgaggttttcgtccatctggtcagaaaacacaatttttttattgtcaagtttggtggcaaatgatccatacagggcgttggataaaagtttggcaatggatcgcatggtttggttcttttccttgtccgcgcgctctttggcggcgatgttgagttggacatactcgcgtgccaggcacttccattcggggaagatagttgttaattcatctggcacgattctcacttgccaccctcgattatgcaaggtaattaaatccacactggtggccacctcgcctcgaaggggttcattggtccaacagagcctacctcctttcctagaacagaaagggggaagtgggtctagcataagttcatcgggagggtctgcatccatggtaaagattcccggaagtaaatccttatcaaaatagctgatgggagtggggtcatctaaggccatttgccattctcgagctgccagtgcgcgctcatatgggttaaggggactgccccatggcatgggatgggtgagtgcagaggcatacatgccacagatgtcatagacgtagatgggatcctcaaagatgcctatgtaggttggatagcatcgcccccctctgatacttgctcgcacatagtcatatagttcatgtgatggcgctagcagccccggacccaagttggtgcgattgggtttttctgttctgtagacgatctggcgaaagatggcgtgagaattggaagagatggtgggtctttgaaaaatgttgaaatgggcatgaggtagacctacagagtctctgacaaagtgggcataagattcttgaagcttggttaccagttcggcggtgacaagtacgtctagggcgcagtagtcaagtgtttcttgaatgatgtcataacctggttggtttttcttttcccacagttcgcggttgagaaggtattcttcgcgatccttccagtactcttctagcggaaacccgtctttgtctgcacggtaagatcctagcatgtagaactgattaactgccttgtaagggcagcagcccttctctacgggtagagagtatgcttgagcagcttttcgtagcgaagcgtgagtaagggcaaaggtgtctctgaccatgactttgaggaattggtatttgaagtcgatgtcgtcacaggctccctgttcccagagttggaagtctacccgtttcttgtaggcggggttgggcaaagcgaaagtaacatcattgaagagaatcttgccggccctgggcatgaaattgcgagtgatgcgaaaaggctgtggtacttccgctcggttattgataacctgggcagctaggacgatctcgtcgaaaccgttgatgttgtgtcctacgatgtataattctatgaaacgcggcgtgcctctgacgtgaggtagcttactgagctcatcaaaggttaggtctgtggggtcagataaggcgtagtgttcgagagcccattcgtgcaggtgaggattcgctttaaggaaggaggaccagaggtccactgccagtgctgtttgtaactggtcccggtactgacgaaaatgccgtccgactgccattttttctggggtgacgcaatagaaggtttgggggtcctgccgccagcgatcccacttgagttttatggcgaggtcataggcgatgttgacgagccgctggtctccagagagtttcatgaccagcatgaaggggattagctgcttgccaaaggaccccatccaggtgtaggtttccacatcgtaggtgagaaagagcctttctgtgcgaggatgagagccaatcgggaagaactggatctcctgccaccagttggaggaatggctgttgatgtgatggaagtagaactccctgcgacgcgccgagcattcatgcttgtgcttgtacagacggccgcagtagtcgcagcgttgcacgggttgtatctcgtgaatgagttgtacctggcttcccttgacgagaaatttcagtgggaagccgaggcctggcgattgtatctcgtgctttactatgttgtctgcatcggcctgttcatcttctgtctcgatggtggtcatgctgacgagccctcgcgggaggcaagtccagacctcggcgcggcaggggcggagctcgaggacgagagcgcgcaggctggagctgtccagggtcctgagacgctgcggactcaggttagtaggcagtgtcaggagattaacttgcatgatcttttggagggcgtgcgggaggttcagatagtacttgatctcaacgggtccgttggtggagatgtcgatggcttgcagggttccgtgtcccttgggcgctaccaccgtgcccttgtttttcattttggacggcggtggctctgttgcttcttgcatgtttagaagcggtgtcgagggcgcgcaccgggcggcaggggcggctcgggacccggcggcatggctggcagtggtacgtcggcgccgcgcgcgggtaggttctggtactgcgccctgagaagactcgcatgcgcgacgacgcggcggttgacatcctggatctgacgcctctgggtgaaagctaccggccccgtgagcttgaacctgaaagagagttcaacagaatcaatctcggtatcgttgacggcggcttgcctaaggatttcttgcacgtcaccagagttgtcctggtaggcgatctccgccatgaactgctcgatctcttcctcttgaagatctccgcggcccgctctctcgacggtggccgcgaggtcgttggagatgcgcccaatgagttgagagaatgcattcatgcccgcctcgttccagacgcggctgtagaccacggcccccacgggatctctcgcgcgcatgaccacctgggcgaggttgagctccacgtggcgggtgaagaccgcatagttgcataggcgctggaaaaggtagttgagtgtggtggcgatgtgctcggtgacgaagaaatacatgatccatcgtctcagcggcatctcgctgacatcgcccagagcttccaagcgctccatggcctcgtagaagtccacggcaaaattaaaaaactgggagtttcgcgcggacacggtcaactcctcttccagaagacggataagttcggcgatggtggtgcgcacctcgcgctcgaaagcccctgggatttcttcctcaatctcttcttcttccactaacatctcttcctcttcaggtggggctgcaggaggagggggaacgcggcgacgccggcggcgcacgggcagacggtcgatgaatctttcaatgacctctccgcggcggcggcgcatggtttcagtgacggcgcggccgttctcgcgcggtcgcagagtaaaaacaccgccgcgcatctccttaaagtggtgactgggaggttctccgtttgggagggagagggcgctgattatacattttattaattggcccgtagggactgcacgcagagatctgatcgtgtcaagatccacgggatctgaaaacctttcgacgaaagcgtctaaccagtcacagtcacaaggtaggctgagtacggcttcttgtgggcgggggtggttatgtgttcggtctgggtcttctgtttcttcttcatctcgggaaggtgagacgatgctgctggtgatgaaattaaagtaggcagttctaagacggcggatggtggcgaggagcaccaggtctttgggtccggcttgctggatacgcaggcgattggccattccccaagcattatcctgacatctagcaagatctttgtagtagtcttgcatgagccgttctacgggcacttcttcctcacccgttctgccatgcatacgtgtgagtccaaatccgcgcattggttgtaccagtgccaagtcagctacgactctttcggcgaggatggcttgctgtacttgggtaagggtggcttgaaagtcatcaaaatccacaaagcggtggtaagctcctgtattaatggtgtaagcacagttggccatgactgaccagttaactgtctggtgaccagggcgcacgagctcggtgtatttaaggcgcgaataggcgcgggtgtcaaagatgtaatcgttgcaggtgcgcaccagatactggtaccctataagaaaatgcggcggtggttggcggtagagaggccatcgttctgtagctggagcgccaggggcgaggtcttccaacataaggcggtgatagccgtagatgtacctggacatccaggtgattcctgcggcggtagtagaagcccgaggaaactcgcgtacgcggttccaaatgttgcgtagcggcatgaagtagttcattgtaggcacggtttgaccagtgaggcgcgcgcagtcattgatgctctatagacacggagaaaatgaaagcgttcagcgactcgactccgtagcctggaggaacgtgaacgggttgggtcgcggtgtaccccggttcgagacttgtactcgagccggccggagccgcggctaacgtggtattggcactcccgtctcgacccagcctacaaaaatccaggatacggaatcgagtcgttttgctggtttccgaatggcagggaagtgagtcctattttttttttttgccgctcagatgcatcccgtgctgcgacagatgcgcccccaacaacagcccccctcgcagcagcagcagcagcaatcacaaaaggctgtccctgcaactactgcaactgccgccgtgagcggtgcgggacagcccgcctatgatctggacttggaagagggcgaaggactggcacgtctaggtgcgccttcacccgagcggcatccgcgagttcaactgaaaaaagattctcgcgaggcgtatgtgccccaacagaacctatttagagacagaagcggcgaggagccggaggagatgcgagcttcccgctttaacgcgggtcgtgagctgcgtcacggtttggaccgaagacgagtgttgcgggacgaggatttcgaagttgatgaaatgacagggatcagtcctgccagggcacacgtggctgcagccaaccttgtatcggcttacgagcagacagtaaaggaagagcgtaacttccaaaagtcttttaataatcatgtgcgaaccctgattgcccgcgaagaagttacccttggtttgatgcatttgtgggatttgatggaagctatcattcagaaccctactagcaaacctctgaccgcccagctgtttctggtggtgcaacacagcagagacaatgaggctttcagagaggcgctgctgaacatcaccgaacccgaggggagatggttgtatgatcttatcaacattctacagagtatcatagtgcaggagcggagcctgggcctggccgagaaggtggctgccatcaattactcggttttgagcttgggaaaatattacgctcgcaaaatctacaagactccatacgttcccatagacaaggaggtgaagatagatgggttctacatgcgcatgacgctcaaggtcttgaccctgagcgatgatcttggggtgtatcgcaatgacagaatgcatcgcgcggttagcgccagcaggaggcgcgagttaagcgacagggaactgatgcacagtttgcaaagagctctgactggagctggaaccgagggtgagaattacttcgacatgggagctgacttgcagtggcagcctagtcgcagggctctgagcgccgcgacggcaggatgtgagcttccttacatagaagaggcggatgaaggcgaggaggaagagggcgagtacttggaagactgatggcacaacccgtgttttttgctagatggaacagcaagcaccggatcccgcaatgcgggcggcgctgcagagccagccgtccggcattaactcctcggacgattggacccaggccatgcaacgtatcatggcgttgacgactcgcaaccccgaagcctttagacagcaaccccaggccaaccgtctatcggccatcatggaagctgtagtgccttcccgctctaatcccactcatgagaaggtcctggccatcgtgaacgcgttggtggagaacaaagctattcgtccagatgaggccggactggtatacaacgctctcttagaacgcgtggctcgctacaacagtagcaatgtgcaaaccaatttggaccgtatgataacagatgtacgcgaagccgtgtctcagcgcgaaaggttccagcgtgatgccaacctgggttcgctggtggcgttaaatgctttcttgagtactcagcctgctaatgtgccgcgtggtcaacaggattatactaactttttaagtgctttgagactgatggtatcagaagtacctcagagcgaagtgtatcagtccggtcctgattacttctttcagactagcagacagggcttgcagacggtaaatctgagccaagcttttaaaaaccttaaaggtttgtggggagtgcatgccccggtaggagaaagagcaaccgtgtctagcttgttaactccgaactcccgcctattattactgttggtagctcctttcaccgacagcggtagcatcgaccgtaattcctatttgggttacctactaaacctgtatcgcgaagccatagggcaaagtcaggtggacgagcagacctatcaagaaattacccaagtcagtcgcgctttgggacaggaagacactggcagtttggaagccactctgaacttcttgcttaccaatcggtctcaaaagatccctcctcaatatgctcttactgcggaggaggagaggatccttagatatgtgcagcagagcgtgggattgtttctgatgcaagagggggcaactccgactgcagcactggacatgacagcgcgaaatatggagcccagcatgtatgccagtaaccgacctttcattaacaaactgctggactacttgcacagagctgccgctatgaactctgattatttcaccaatgccatcttaaacccgcactggctgcccccacctggtttctacacgggcgaatatgacatgcccgaccctaatgacggatttctgtgggacgacgtggacagcgatgttttttcacctctttctgatcatcgcacgtggaaaaaggaaggcggcgatagaatgcattcttctgcatcgctgtccggggtcatgggtgctaccgcggctgagcccgagtctgcaagtccttttcctagtctacccttttctctacacagtgtacgtagcagcgaagtgggtagaataagtcgcccgagtttaatgggcgaagaggagtatctaaacgattccttgctcagaccggcaagagaaaaaaatttcccaaacaatggaatagaaagtttggtggataaaatgagtagatggaagacttatgctcaggatcacagagacgagcctgggatcatggggattacaagtagagcgagccgtagacgccagcgccatgacagacagaggggtcttgtgtgggacgatgaggattcggccgatgatagcagcgtgctggacttgggtgggagaggaaggggcaacccgtttgctcatttgcgccctcgcttgggtggtatgttgtaaaaaaaaataaaaaaaaaactcaccaaggccatggcgacgagcgtacgttcgttcttctttattatctgtgtctagtataatgaggcgagtcgtgctaggcggagcggtggtgtatccggagggtcctcctccttcgtacgagagcgtgatgcagcagcagcaggcgacggcggtgatgcaatccccactggaggctccctttgtgcctccgcgatacctggcacctacggagggcagaaacagcattcgttattcggaactggcacctcagtacgataccaccaggttgtatctggtggacaacaagtcggcggacattgcttctctgaactatcagaatgaccacagcaacttcttgaccacggtggtgcaaaacaatgactttacccctacggaagccagcacccagaccattaactttgatgaacgatcgcggtggggcggtcagctaaagaccatcatgcatactaacatgccaaacgtgaacgagtatatgtttagtaacaagttcaaagcgcgtgtgatggtgtccagaaaacctcccgacggtgctgcagttggggatacttatgatcacaagcaggatattttgaaatatgagtggttcgagtttactttgccagaaggcaacttttcagttactatgactattgatttgatgaacaatgccatcatagataattacttgaaagtgggtagacagaatggagtgcttgaaagtgacattggtgttaagttcgacaccaggaacttcaagctgggatgggatcccgaaaccaagttgatcatgcctggagtgtatacgtatgaagccttccatcctgacattgtcttactgcctggctgcggagtggattttaccgagagtcgtttgagcaaccttcttggtatcagaaaaaaacagccatttcaagagggttttaagattttgtatgaagatttagaaggtggtaatattccggccctcttggatgtagatgcctatgagaacagtaagaaagaacaaaaagccaaaatagaagctgctacagctgctgcagaagctaaggcaaacatagttgccagcgactctacaagggttgctaacgctggagaggtcagaggagacaattttgcgccaacacctgttccgactgcagaatcattattggccgatgtgtctgaaggaacggacgtgaaactcactattcaacctgtagaaaaagatagtaagaatagaagctataatgtgttggaagacaaaatcaacacagcctatcgcagttggtatctttcgtacaattatggcgatcccgaaaaaggagtgcgttcctggacattgctcaccacctcagatgtcacctgcggagcagagcaggtctactggtcgcttccagacatgatgaaggatcctgtcactttccgctccactagacaagtcagtaactaccctgtggtgggtgcagagcttatgcccgtcttctcaaagagcttctacaacgaacaagctgtgtactcccagcagctccgccagtccacctcgcttacgcacgtcttcaaccgctttcctgagaaccagattttaatccgtccgccggcgcccaccattaccaccgtcagtgaaaacgttcctgctctcacagatcacgggaccctgccgttgcgcagcagtatccggggagtccaacgtgtgaccgttactgacgccagacgccgcacctgtccctacgtgtacaaggcactgggcatagtcgcaccgcgcgtcctttcaagccgcactttctaaaaaaaaaaaaaatgtccattcttatctcgcccagtaataacaccggttggggtctgcgcgctccaagcaagatgtacggaggcgcacgcaaacgttctacccaacatcctgtccgtgttcgcggacattttcgcgctccatggggcgccctcaagggccgcactcgcgttcgaaccaccgtcgatgatgtaatcgatcaggtggttgccgacgcccgtaattatactcctactgcgcctacatctactgtggatgcagttattgacagtgtagtggctgacgctcgcaactatgctcgacgtaagagccggcgaaggcgcattgccagacgccaccgagctaccactgccatgcgagccgcaagagctctgctacgaagagctagacgcgtggggcgaagagccatgcttagggcggccagacgtgcagcttcgggcgccagcgccggcaggtcccgcaggcaagcagccgctgtcgcagcggcgactattgccgacatggcccaatcgcgaagaggcaatgtatactgggtgcgtgacgctgccaccggtcaacgtgtacccgtgcgcacccgtccccctcgcacttagaagatactgagcagtctccgatgttgtgtcccagcggcgaggatgtccaagcgcaaatacaaggaagaaatgctgcaggttatcgcacctgaagtctacggccaaccgttgaaggatgaaaaaaaaccccgcaaaatcaagcgggttaaaaaggacaaaaaagaagaggaagatggcgatgatgggctggcggagtttgtgcgcgagtttgccccacggcgacgcgtgcaatggcgtgggcgcaaagttcgacatgtgttgagacctggaacttcggtggtctttacacccggcgagcgttcaagcgctacttttaagcgttcctatgatgaggtgtacggggatgatgatattcttgagcaggcggctgaccgattaggcgagtttgcttatggcaagcgtagtagaataacttccaaggatgagacagtgtcgatacccttggatcatggaaatcccacccctagtcttaaaccggtcactttgcagcaagtgttacccgtaactccgcgaacaggtgttaaacgcgaaggtgaagatttgtatcccactatgcaactgatggtacccaaacgccagaagttggaggacgttttggagaaagtaaaagtggatccagatattcaacctgaggttaaagtgagacccattaagcaggtagcgcctggtctgggggtacaaactgtagacattaagattcccactgaaagtatggaagtgcaaactgaacccgcaaagcctactgccacctccactgaagtgcaaacggatccatggatgcccatgcctattacaactgacgccgccggtcccactcgaagatcccgacgaaagtacggtccagcaagtctgttgatgcccaattatgttgtacacccatctattattcctactcctggttaccgaggcactcgctactatcgcagccgaaacagtacctcccgccgtcgccgcaagacacctgcaaatcgcagtcgtcgccgtagacgcacaagcaaaccgactcccggcgccctggtgcggcaagtgtaccgcaatggtagtgcggaacctttgacactgccgcgtgcgcgttaccatccgagtatcatcacttaatcaatgttgccgctgcctccttgcagatatggccctcacttgtcgccttcgcgttcccatcactggttaccgaggaagaaactcgcgccgtagaagagggatgttgggacgcggaatgcgacgctacaggcgacggcgtgctatccgcaagcaattgcggggtggttttttaccagccttaattccaattatcgctgctgcaattggcgcgataccaggcatagcttccgtggcggttcaggcctcgcaacgacattgacattggaaaaaaacgtataaataaaaaaaaaaaaatacaatggactctgacactcctggtcctgtgactatgttttcttagagatggaagacatcaatttttcatccttggctccgcgacacggcacgaagccgtacatgggcacctggagcgacatcggcacgagccaactgaacgggggcgccttcaattggagcagtatctggagcgggcttaaaaattttggctcaaccataaaaacatacgggaacaaagcttggaacagcagtacaggacaggcgcttagaaataaacttaaagaccagaacttccaacaaaaagtagtcgatgggatagcttccggcatcaatggagtggtagatttggctaaccaggctgtgcagaaaaagataaacagtcgtttggacccgccgccagcaaccccaggtgaaatgcaagtggaggaagaaattcctccgccagaaaaacgaggcgacaagcgtccgcgtcccgatttggaagagacgctggtgacgcgcgtagatgaaccgccttcttatgaggaagcaacgaagcttggaatgcccaccactagaccgatagccccaatggccaccggggtgatgaaaccttctcagttgcatcgacccgtcaccttggatttgccccctccccctgctgctactgctgtacccgcttctaagcctgtcgctgccccgaaaccagtcgccgtagccaggtcacgtcccgggggcgctcctcgtccaaatgcgcactggcaaaatactctgaacagcatcgtgggtctaggcgtgcaaagtgtaaaacgccgtcgctgcttttaattaaatatggagtagcgcttaacttgcctatctgtgtatatgtgtcattacacgccgtcacagcagcagaggaaaaaaggaagaggtcgtgcgtcgacgctgagttactttcaagatggccaccccatcgatgctgccccaatgggcatacatgcacatcgccggacaggatgcttcggagtacctgagtccgggtctggtgcagttcgcccgcgccacagacacctacttcaatctgggaaataagtttagaaatcccaccgtagcgccgacccacgatgtgaccaccgaccgtagccagcggctcatgttgcgcttcgtgcccgttgaccgggaggacaatacatactcttacaaagtgcggtacaccctggccgtgggcgacaacagagtgctggatatggccagcacgttctttgacattaggggtgtgttggacagaggtcccagtttcaaaccctattctggtacggcttacaactccctggctcctaaaggcgctccaaatacatctcagtggattgcagaaggtgtaaaaaatacaactggtgaggaacacgtaacagaagaggaaaccaatactactacttacacttttggcaatgctcctgtaaaagctgaagctgaaattacaaaagaaggactcccagtaggtttggaagtttcagatgaagaaagtaaaccgatttatgctgataaaacatatcagccagaacctcagctgggagatgaaacttggactgaccttgatggaaaaaccgaaaagtatggaggcagggctctcaaacccgatactaagatgaaaccatgctacgggtcctttgccaaacctactaatgtgaaaggcggtcaggcaaaacaaaaaacaacggagcagccaaatcagaaagtcgaatatgatatcgacatggagttttttgatgcggcatcgcagaaaacaaacttaagtcctaaaattgtcatgtatgcagaaaatgtaaatttggaaactccagacactcatgtagtgtacaaacctggaacagaagacacaagttccgaagctaatttgggacaacaatctatgcccaacagacccaactacattggcttcagagataactttattggacttatgtactataacagtactggtaacatgggggtgctggctggtcaagcgtctcagttaaatgcagtggttgacttgcaggacagaaacacagaactttcttaccaactcttgcttgactctctgggcgacagaaccagatactttagcatgtggaatcaggctgtggacagttatgatcctgatgtacgtgttattgaaaatcatggtgtggaagatgaacttcccaactactgttttccactggacggcataggtgttccaacaaccagttacaaatcaatagttccaaatggagacaatgcgcctaattggaaggaacctgaagtaaatggaacaagtgagatcggacagggtaatttgtttgccatggaaattaaccttcaagccaatctatggcgaagtttcctttattccaatgtggctctatatctcccagactcgtacaaatacaccccgtccaatgtcactcttccagaaaacaaaaacacctacgactacatgaacgggcgggtggtgccgccatctctagtagacacctatgtgaacattggtgccaggtggtctctggatgccatggacaatgtcaacccattcaaccaccaccgtaacgctggcttgcgttaccgatccatgcttctgggtaacggacgttatgtgcctttccacatacaagtgcctcaaaaattcttcgctgttaaaaacctgctgcttctcccaggctcctacacttatgagtggaactttaggaaggatgtgaacatggttctacagagttccctcggtaacgacctgcgggtagatggcgccagcatcagtttcacgagcatcaacctctatgctacttttttccccatggctcacaacaccgcttccacccttgaagccatgctgcggaatgacaccaatgatcagtcattcaacgactacctatctgcagctaacatgctctaccccattcctgccaatgcaaccaatattcccatttccattccttctcgcaactgggcggctttcagaggctggtcatttaccagactgaaaaccaaagaaactccctctttggggtctggatttgacccctactttgtctattctggttctattccctacctggatggtaccttctacctgaaccacacttttaagaaggtttccatcatgtttgactcttcagtgagctggcctggaaatgacaggttactatctcctaacgaatttgaaataaagcgcactgtggatggcgaaggctacaacgtagcccaatgcaacatgaccaaagactggttcttggtacagatgctcgccaactacaacatcggctatcagggcttctacattccagaaggatacaaagatcgcatgtattcatttttcagaaacttccagcccatgagcaggcaggtggttgatgaggtcaattacaaagacttcaaggccgtcgccataccctaccaacacaacaactctggctttgtgggttacatggctccgaccatgcgccaaggtcaaccctatcccgctaactatccctatccactcattggaacaactgccgtaaatagtgttacgcagaaaaagttcttgtgtgacagaaccatgtggcgcataccgttctcgagcaacttcatgtctatgggggcccttacagacttgggacagaatatgctctatgccaactcagctcatgctctggacatgacctttgaggtggatcccatggatgagcccaccctgctttatcttctcttcgaagttttcgacgtggtcagagtgcatcagccacaccgcggcatcatcgaggcagtctacctgcgtacaccgttctcggccggtaacgctaccacgtaagaagcttcttgcttcttgcaaatagcagctgcaaccatggcctgcggatcccaaaacggctccagcgagcaagagctcagagccattgtccaagacctgggttgcggaccctattttttgggaacctacgataagcgcttcccggggttcatggcccccgataagctcgcctgtgccattgtaaatacggccggacgtgagacggggggagagcactggttggctttcggttggaacccacgttctaacacctgctacctttttgatccttttggattctcggatgatcgtctcaaacagatttaccagtttgaatatgagggtctcctgcgccgcagcgctcttgctaccaaggaccgctgtattacgctggaaaaatctacccagaccgtgcagggtccccgttctgccgcctgcggacttttctgctgcatgttccttcacgcctttgtgcactggcctgaccgtcccatggacggaaaccccaccatgaaattgctaactggagtgccaaacaacatgcttcattctcctaaagtccagcccaccctgtgtgacaatcaaaaagcactctaccattttcttaatacccattcgccttattttcgctcccatcgtacacacatcgaaagggccactgcgttcgaccgtatggatgttcaataatgactcatgtaaacaacgtgttcaataaacatcactttatttttttacatgtatcaaggctctgcattacttatttatttacaagtcgaatgggttctgacgagaatcagaatgacccgcaggcagtgatacgttgcggaactgatacttgggttgccacttgaattcgggaatcaccaacttgggaaccggtatatcgggcaggatgtcactccacagctttctggtcagctgcaaagctccaagcaggtcaggagccgaaatcttgaaatcacaattaggaccagtgctttgagcgcgagagttgcggtacaccggattgcagcactgaaacaccatcagcgacggatgtctcacgcttgccagcacggtgggatctgcaatcatgcccacatccagatcttcagcattggcaatgctgaacggggtcatcttgcaggtctgcctacccatggcgggcacccaattaggcttgtggttgcaatcgcagtgcagggggatcagtatcatcttggcctgatcctgtctgattcctggatacacggctctcatgaaagcatcatattgcttgaaagcctgctgggctttactaccctcggtataaaacatcccgcaggacctgctcgaaaactggttagctgcacagccggcatcattcacacagcagcgggcgtcattgttagctatttgcaccacacttctgccccagcggttttgggtgattttggttcgctcgggattctcctttaaggctcgttgtccgttctcgctggccacatccatctcgataatctgctccttctgaatcataatattgccatgcaggcacttcagcttgccctcataatcattgcagccatgaggccacaacgcacagcctgtacattcccaattatggtgggcgatctgagaaaaagaatgtatcattccctgcagaaatcttcccatcatcgtgctcagtgtcttgtgactagtgaaagttaactggatgcctcggtgctcctcgtttacgtactggtgacagatgcgcttgtattgttcgtgttgctcaggcattagtttaaaagaggttctaagttcgttatccagcctgtacttctccatcagcagacacatcacttccatgcctttctcccaagcagacaccaggggcaagctaatcggattcttaacagtgcaggcagcagctcctttagccagagggtcatctttagcgatcttctcaatgcttcttttgccatccttctcaacgatgcgcacgggcgggtagctgaaacccactgctacaagttgcgcctcttctctttcttcttcgctgtcttgactgatgtcttgcatggggatatgtttggtcttccttggcttctttttggggggtatcggaggaggaggactgtcgctccgttccggagacagggaggattgtgacgtttcgctcaccattaccaactgactgtcggtagaagaacctgaccccacacggcgacaggtgtttctcttcgggggcagaggtggaggcgattgcgaagggctgcggtccgacctggaaggcggatgactggcagaaccccttccgcgttcgggggtgtgctccctgtggcggtcgcttaactgatttccttcgcggctggccattgtgttctcctaggcagagaaacaacagacatggaaactcagccattgctgtcaacatcgccacgagtgccatcacatctcgtcctcagcgacgaggaaaaggagcagagcttaagcattccaccgcccagtcctgccaccacctctaccctagaagataaggaggtcgacgcatctcatgacatgcagaataaaaaagcgaaagagtctgagacagacatcgagcaagacccgggctatgtgacaccggtggaacacgaggaagagttgaaacgctttctagagagagaggatgaaaactgcccaaaacaacgagcagataactatcaccaagatgctggaaatagggatcagaacaccgactacctcatagggcttgacggggaagacgcgctccttaaacatctagcaagacagtcgctcatagtcaaggatgcattattggacagaactgaagtgcccatcagtgtggaagagctcagccgcgcctacgagcttaacctcttttcacctcgtactccccccaaacgtcagccaaacggcacctgcgagccaaatcctcgcttaaacttttatccagcttttgctgtgccagaagtactggctacctatcacatcttttttaaaaatcaaaaaattccagtctcctgccgcgctaatcgcacccgcgccgatgccctactcaatctgggacctggttcacgcttacctgatatagcttccttggaagaggttccaaagatcttcgagggtctgggcaataatgagactcgggccgcaaatgctctgcaaaagggagaaaatggcatggatgagcatcacagcgttctggtggaattggaaggcgataatgccagactcgcagtactcaagcgaagcatcgaggtcacacacttcgcatatcccgctgtcaacctgccccctaaagtcatgacggcggtcatggaccagttactcattaagcgcgcaagtcccctttcagaagacatgcatgacccagatgcctgtgatgagggtaaaccagtggtcagtgatgagcagctaacccgatggctgggcaccgactctcccagggatttggaagagcgtcgcaagcttatgatggccgtggtgctggttaccgtagaactagagtgtctccgacgtttctttaccgattcagaaaccttgcgcaaactcgaagagaatctgcactacacttttagacacggctttgtgcggcaggcatgcaagatatctaacgtggaactcaccaacctggtttcctacatgggtattctgcatgagaatcgcctaggacaaagcgtgctgcacagcaccctgaagggggaagcccgccgtgattacatccgcgattgtgtctatctgtacctgtgccacacgtggcaaaccggcatgggtgtatggcagcaatgtttagaagaacagaacttgaaagagcttgacaagctcttacagaaatctcttaaggttctgtggacagggttcgacgagcgcaccgtcgcttccgacctggcagacctcatcttcccagagcgtctcagggttactttgcgaaacggattgcctgactttatgagccagagcatgcttaacaattttcgctctttcatcctggaacgctccggtatcctgcccgccacctgctgcgcactgccctccgactttgtgcctctcacctaccgcgagtgccccccgccgctatggagtcactgctacctgttccgtctggccaactatctctcctaccactcggatgtgatcgaggatgtgagcggagacggcttgctggagtgtcactgccgctgcaatctgtgcacgccccaccggtccctagcttgcaacccccagttgatgagcgaaacccagataataggcacctttgaattgcaaggccccagcagccaaggcgatgggtcttctcctgggcaaagtttaaaactgaccccgggactgtggacctccgcctacttgcgcaagtttgctccggaagattaccacccctatgaaatcaagttctatgaggaccaatcacagcctccaaaggccgaactttcggcctgcgtcatcacccagggggcaattctggcccaattgcaagccatccaaaaatcccgccaagaatttctactgaaaaagggtaagggggtctaccttgacccccagaccggcgaggaactcaacacaaggttccctcaggatgtcccaacgacgagaaaacaagaagttgaaggtgcagccgccgcccccagaagatatggaggaagattgggacagtcaggcagaggaggcggaggaggacagtctggaggacagtctggaggaagacagtttggaggaggaaaacgaggaggcagaggaggtggaagaagtaaccgccgacaaacagttatcctcggctgcggagacaagcaacagcgctaccatctccgctccgagtcgaggaacccggcggcgtcccagcagtagatgggacgagaccggacgcttcccgaacccaaccagcgcttccaagaccggtaagaaggatcggcagggatacaagtcctggcgggggcataagaatgccatcatctcctgcttgcatgagtgcgggggcaacatatccttcacgcggcgctacttgctattccaccatggggtgaactttccgcgcaatgttttgcattactaccgtcacctccacagcccctactatagccagcaaatcccggcagtctcgacagataaagacagcggcggcgacctccaacagaaaaccagcagcggcagttagaaaatacacaacaagtgcagcaacaggaggattaaagattacagccaacgagccagcgcaaacccgagagttaagaaatcggatctttccaaccctgtatgccatcttccagcagagtcggggtcaagagcaggaactgaaaataaaaaaccgatctctgcgttcgctcaccagaagttgtttgtatcacaagagcgaagatcaacttcagcgcactctcgaggacgccgaggctctcttcaacaagtactgcgcgctgactcttaaagagtaggcagcgaccgcgcttattcaaaaaaggcgggaattacatcatcctcgacatgagtaaagaaattcccacgccttacatgtggagttatcaaccccaaatgggattggcggcaggcgcctcccaggactactccacccgcatgaattggctcagcgccgggccttctatgatttctcgagttaatgatatacgcgcctaccgaaaccaaatacttttggaacagtcagctcttaccaccacgccccgccaacaccttaatcccagaaattggcccgccgccctagtgtaccaggaaagtcccgctcccaccactgtattacttcctcgagacgcccaggccgaagtccaaatgactaatgcaggtgcgcagttagctggcggctccaccctatgtcgtcacaggcctcggcataatataaaacgcctgatgatcagaggccgaggtatccagctcaacgacgagtcggtgagctctccgcttggtctacgaccagacggaatctttcagattgccggctgcgggagatcttccttcacccctcgtcaggctgttctgactttggaaagttcgtcttcgcaaccccgctcgggcggaatcgggaccgttcaatttgtggaggagtttactccctctgtctacttcaaccccttctccggatctcctgggcattacccggacgagttcataccgaacttcgacgcgattagcgagtcagtggacggctacgattgatgtctggtgacgcggctgagctatctcggctgcgacatctagaccactgccgccgctttcgctgctttgcccgggaactcattgagttcatctacttcgaactccccaaggatcaccctcaaggtccggcccacggagtgcggatttctatcgaaggcaaaatagactctcgcctgcaacgaattttctcccagcggcccgtgctgatcgagcgagaccagggaaacaccacggtttccatctactgcatttgtaatcaccccggattgcatgaaagcctttgctgtcttatgtgtactgagtttaataaaaactgaattaagactctcctacggactgccgcttcttcaacccggattttacaaccagaagaacgaaacttttcctgtcgtccaggactctgttaacttcacctttcctactcacaaactagaagctcaacgactacaccgcttttccagaagcattttccctactaatactactttcaaaaccggaggtgagctccaaggtcttcctacagaaaacccttgggtggaagcgggccttgtagtgctaggaattcttgcgggtgggcttgtgattattctttgctacctatacacaccttgcttcactttcttagtggtgttgtggtattggtttaaaaaatggggcccatactagtcttgcttgttttactttcgcttttggaaccgggttctgccaattacgatccatgtctagacttcgacccagaaaactgcacacttacttttgcacccgacacaagccgcatctgtggagttcatcgcctctcttacgaacttggcccccaacgacaaaaatttacctgcatggtgggaatcaaccccatagttatcacccagcaaagtggagatactaagggttgcattcactgctcctgcgattccatcgagtgcacctacaccctgctgaagaccctatgcggcctaagagacctgctaccaatgaattaaaaaatgattaataaaaaatcacttacttgaaatcagcaataaggtctctgttgaaattttctcccagcagcacctcacttccctcttcccaactctggtattctaaaccccgttcagcggcatactttctccatactttaaaggggatgtcaaattttagctcctctcctgtacccacaatcttcatgtctttcttcccagatgaccaagagagtccggctcagtgactccttcaaccctgtctacccctatgaagatgaaagcacctcccaacacccctttataaacccagggtttatttccccaaatggcttcacacaaagcccaaacggagttcttactttaaaatgtttaaccccactaacaaccacaggcggatctctacagctaaaagtgggagggggacttacagtggatgacaccaacggttttttgaaagaaaacataagtgccaccacaccactcgttaagactggtcactctataggtttaccactaggagccggattgggaacgaatgaaaataaactttgtatcaaattaggacaaggacttacattcaattcaaacaacatttgcattgatgacaatattaacaccttatggacaggagtcaaccccaccgaagccaactgtcaaatcatgaactccagtgaatctaatgattgcaaattaattctaacactagttaaaactggagcactagtcactgcatttgtttatgttataggagtatctaacaattttaatatgctaactacacacagaaatataaattttactgcagagctgtttttcgattctactggtaatttactaactagactctcatccctcaaaactccacttaatcataaatcaggacaaaacatggctactggtgccattactaatgctaaaggtttcatgcccagcacgactgcctatcctttcaatgataattctagagaaaaagaaaactacatttacggaacttgttactacacagctagtgatcgcactgcttttcccattgacatatctgtcatgcttaaccgaagagcaataaatgacgagacatcatattgtattcgtataacttggtcctggaacacaggagatgccccagaggtgcaaacctctgctacaaccctagtcacctccccatttaccttttactacatcagagaagacgactgacaaataaagtttgcgatcgccaggcccaccatggcccaatctctcgcacttagtctgctcattctcgtgcttgctttcgggattccaagaactcagggaagcgacggcggtgcccaagattgctgtctgaaatatagtcagagaaaaatccctgctaaagtggttcggagttatcgcaaacaagagcccagtttggggtgttcaattcccgcaattctctttttaccacggaaacggtcccaagctgaactgtgcgctgatcctaaagaactgtgggtccaacagctcatgcaacaccttgataaaaccccttctccccaaaagcctgctcaagggggaagcggagctactaacttcagcctgctgaagcaggctggagacgtggaggagaaccctggacctgactggacctggcgcatcctgttcttggtggcagctgctacgggagctcattccaactgggtgaatgtaataagtgatttgaaaaaaattgaagatcttattcaatctatgcatattgatgctactttatatacggaaagtgatgttcaccccagttgcaaagtaacagcaatgaagtgctttctcttggagttacaagttatttcacttgagtccggagatgcaagtattcatgatacagtagaaaatctgatcatcctagcaaacaacagtttgtcttctaatgggaatgtaacagaatctggatgcaaagaatgtgaggaactggaggaaaaaaatattaaagaatttttgcagagttttgtacatattgtccaaatgttcatcaacacttctggaagcggagagggcagaggaagtctgctaacatgcggtgacgtcgaggagaatcctggacctgccttgacctttgctttactggtggccctcctggtgctcagctgcaagtcaagctgctctgtgggctgtgatctgcctcaaacccacagcctgggtagcaggaggaccttgatgctcctggcacagatgaggagaatctctcttttctcctgcttgaaggacagacatgactttggatttccccaggaggagtttggcaaccagttccaaaaggctgaaaccatccctgtcctccatgagatgatccagcagatcttcaatctcttcagcacaaaggactcatctgctgcttgggatgagaccctcctagacaaattctacactgaactctaccagcagctgaatgacctggaagcctgtgtgatacagggggtgggggtgacagagactcccctgatgaaggaggactccattctggctgtgaggaaatacttccaaagaatcactctctatctgaaagagaagaaatacagcccttgtgcctgggaggttgtcagagcagaaatcatgagatctttttctttgtcaacaaacttgcaagaaagtttaagaagtaaggaaggaagcggacagtgtactaattatgctctcttgaaattggctggagatgttgagagcaaccctggacctaagaaaagtggtgttcttttcctcttgggcatcatcttgctggttctgattggagtgcaaggaaccccagtagtgagaaagggtcgctgttcctgcatcagcaccaaccaagggactatccacctacaatccttgaaagaccttaaacaatttgccccaagcccttcctgcgagaaaattgaaatcattgctacactgaagaatggagttcaaacatgtctaaacccagattcagcagatgtgaaggaactgattaaaaagtgggagaaacaggtcagccaaaagaaaaagcaaaagaatgggaaaaaacatcaaaaaaagaaagttctgaaagttcgaaaatctcaacgttctcgtcaaaagaagactacaggaagcggagtgaaacagactttgaattttgaccttctcaagttggcgggagacgtggagtccaaccctggacctatgtgtcaccagcagttggtcatctcttggttttccctggtttttctggcatctcccctcgtggccatatgggaactgaagaaagatgtttatgtcgtagaattggattggtatccggatgcccctggagaaatggtggtcctcacctgtgacacccctgaagaagatggtatcacctggaccttggaccagagcagtgaggtcttaggctctggcaaaaccctgaccatccaagtcaaagagtttggagatgctggccagtacacctgtcacaaaggaggcgaggttctaagccattcgctcctgctgcttcacaaaaaggaagatggaatttggtccactgatattttaaaggaccagaaagaacccaaaaataagacctttctaagatgcgaggccaagaattattctggacgtttcacctgctggtggctgacgacaatcagtactgatttgacattcagtgtcaaaagcagcagaggctcttctgacccccaaggggtgacgtgcggagctgctacactctctgcagagagagtcagaggggacaacaaggagtatgagtactcagtggagtgccaggaggacagtgcctgcccagctgctgaggagagtctgcccattgaggtcatggtggatgccgttcacaagctcaagtatgaaaactacaccagcagcttcttcatcagggacatcatcaaacctgacccacccaagaacttgcagctgaagccattaaagaattctcggcaggtggaggtcagctgggagtaccctgacacctggagtactccacattcctacttctccctgacattctgcgttcaggtccagggcaagagcaagagagaaaagaaagatagagtcttcacggacaagacctcagccacggtcatctgccgcaaaaatgccagcattagcgtgcgggcccaggaccgctactatagctcatcttggagcgaatgggcatctgtgccctgcagtggagggggcggcagcgggggaggcggcagcggcggcgggggatcgagaaacctccccgtggccactccagacccaggaatgttcccatgccttcaccactcccaaaacctgctgagggccgtcagcaacatgctccagaaggccagacaaactctagaattttacccttgcacttctgaagagattgatcatgaagatatcacaaaagataaaaccagcacagtggaggcctgtttaccattggaattaaccaagaatgagagttgcctaaattccagagagacctctttcataactaatgggagttgcctggcctccagaaagacctcttttatgatggccctgtgccttagtagtatttatgaagacttgaagatgtaccaggtggagttcaagaccatgaatgcaaagcttctgatggatcctaagaggcagatctttctagatcaaaacatgctggcagttattgatgagctgatgcaggccctgaatttcaacagtgagactgtgccacaaaaatcctcccttgaagaaccggatttttataaaactaaaatcaagctctgcatacttcttcatgctttcagaattcgggcagtgactattgatagagtgatgagctatctgaatgcttcctaagctagcttgactgactgagatacagcgtaccttcagctcacagacatgataagatacattgatgagtttggacaaaccacaactagaatgcagtgaaaaaaatgctttatttgtgaaatttgtgatgctattgctttatttgtaaccattataagctgcaataaacaagttaacaacaacaattgcattcattttatgtttcaggttcagggggaggtgtgggaggttttttaaagcaagtaaaacctctacaaatgtggtagtcgtcagctatcctgcaggaacttgtttatttgaaaatcaattcacaaaatccgagtagttattttgcctcccccttcccatttaacagaatacaccaatctctccccacgcacagctttaaacatttggataccattagatatagacatggttttagattccacattccaaacagtttcagagcgagccaatctggggtcagtgatagataaaaatccatcgggatagtcttttaaagcgctttcacagtccaactgctgcggatgcgactccggagtctggatcacggtcatctggaagaagaacgatgggaatcataatccgaaaacggtatcggacgattgtgtctcatcaaacccacaagcagccgctgtctgcgtcgctccgtgcgactgctgtttatgggatcagggtccacagtgtcctgaagcatgattttaatagcccttaacatcaactttctggtgcgatgcgcgcagcaacgcattctgatttcactcaaatctttgcagtaggtacaacacattattacaatattgtttaataaaccataattaaaagcgctccagccaaaactcatatctgatataatcgcccctgcatgaccatcataccaaagtttaatataaattaaatgacgttccctcaaaaacacactacccacatacatgatctcttttggcatgtgcatattaacaatctgtctgtaccatggacaacgttggttaatcatgcaacccaatataaccttccggaaccacactgccaacaccgctcccccagccatgcattgaagtgaaccctgctgattacaatgacaatgaagaacccaattctctcgaccgtgaatcacttgagaatgaaaaatatctatagtggcacaacatagacataaatgcatgcatcttctcataatttttaactcctcaggatttagaaacatatcccagggaataggaagctcttgcagaacagtaaagctggcagaacaaggaagaccacgaacacaacttacactatgcatagtcatagtatcacaatctggcaacagcgggtggtcttcagtcatagaagctcgggtttcattttcctcacaacgtggtaactgggctctggtgtaagggtgatgtctggcgcatgatgtcgagcgtgcgcgcaaccttgtcataatggagttgcttcctgacattctcgtattttgtatagcaaaacgcggccctggcagaacacactcttcttcgccttctatcctgccgcttagcgtgttccgtgtgatagttcaagtacaaccacactcttaagttggtcaaaagaatgctggcttcagttgtaatcaaaactccatcgcatctaatcgttctgaggaaatcatccaagcaatgcaactggattgtgtttcaagcaggagaggagagggaagagacggaagaaccatgttaatttttattccaaacgatctcgcagtacttcaaattgtagatcgcgcagatggcatctctcgcccccactgtgttggtgaaaaagcacagctagatcaaaagaaatgcgattttcaaggtgctcaacggtggcttccagcaaagcctccacgcgcacatccaagaacaaaagaataccaaaagaaggagcattttctaactcctcaatcatcatattacattcctgcaccattcccagataattttcagctttccagccttgaattattcgtgtcagttcttgtggtaaatccaatccacacattacaaacaggtcccggagggcgccctccaccaccattcttaaacacaccctcataatgacaaaatatcttgctcctgtgtcacctgtagcgaattgagaatggcaacatcaattgacatgcccttggctctaagttcttctttaagttctagttgtaaaaactctctcatattatcaccaaactgcttagccagaagccccccgggaacaagagcaggggacgctacagtgcagtacaagcgcagacctccccaattggctccagcaaaaacaagattggaataagcatattgggaaccgccagtaatatcatcgaagttgctggaaatataatcaggcagagtttcttgtaaaaattgaataaaagaaaaatttgccaaaaaaacattcaaaacctctgggatgcaaatgcaataggttaccgcgctgcgctccaacattgttagttttgaattagtctgcaaaaataaaaaaaaaaacaagcgtcatatcatagtagcctgacgaacagatggataaatcagtctttccatcacaagacaagccacagggtctccagctcgaccctcgtaaaacctgtcatcatgattaaacaacagcaccgaaagttcctcgcggtgaccagcatgaataattcttgatgaagcatacaatccagacatgttagcatcagttaacgagaaaaaacagccaacatagcctttgggtataattatgcttaatcgtaagtatagcaaagccacccctcgcggatacaaagtaaaaggcacaggagaataaaaaatataattatttctctgctgctgttcaggcaacgtcgcccccggtccctctaaatacacatacaaagcctcatcagccatggcttaccagacaaagtacagcgggcacacaaagcacaagctctaaagtgactctccaacctctccacaatatatatatacacaagccctaaactgacgtaatgggagtaaagtgtaaaaaatcccgccaaacccaacacacaccccgaaactgcgtcaccagggaaaagtacagtttcacttccgcaatcccaacaggcgtaacttcctctttctcacggtacgtgatatcccactaacttgcaacgtcattttcccacggtcgcaccgccccttttagccgttaaccccacagccaatcaccacacgatccacactttttaaaatcacctcatttacatattggcaccattccatctataaggtatattatatagataga

SEQ ID NO: 111 - DNA, 36157 bp, Artificial Sequence
  Genome sequence of NG-770 virus
tctatctatataatataccttatagatggaatggtgccaatatgtaaatgaggtgattttaaaaagtgtggatcgtgtggtgattggctgtggggttaacggctaaaaggggcggtgcgaccgtgggaaaatgacgttttgtgggggtggagtttttttgcaagttgtcgcgggaaatgtgacgcataaaaaggcttttttctcacggaactacttagttttcccacggtatttaacaggaaatgaggtagttttgaccggatgcaagtgaaaattgttgattttcgcgcgaaaactgaatgaggaagtgtttttctgaataatgtggtatttatggcagggtggagtatttgttcagggccaggtagactttgacccattacgtggaggtttcgattaccgtgttttttacctgaatttccgcgtaccgtgtcaaagtcttctgtttttacgtaggtgtcagctgatcgctagggtatttatacctcagggtttgtgtcaagaggccactcttgagtgccagcgagaagagttttctcctctgcgccggcagtttaataataaaaaaatgagagatttgcgatttctgcctcaggaaataatctctgctgagactggaaatgaaatattggagcttgtggtgcacgccctgatgggagacgatccggagccacctgtgcagctttttgagcctcctacgcttcaggaactgtatgatttagaggtagagggatcggaggattctaatgaggaagctgtaaatggcttttttaccgattctatgcttttagctgctaatgaagggttagaattagatccgcctttggacacttttgatactccaggggtaattgtggaaagcggtacaggtgtaagaaaattacctgatttgagttccgtggactgtgatttgcactgctatgaagacgggtttcctccgagtgatgaggaggaccatgaaaaggagcagtccatgcagactgcagcgggtgagggagtgaaggctgccaatgttggttttcagttggattgcccggagcttcctggacatggctgtaagtcttgtgaatttcacaggaaaaatactggagtaaaggaactgttatgttcgctttgttatatgagaacgcactgccactttatttacagtaagtgtgtttaagttaaaatttaaaggaatatgctgtttttcacatgtatattgagtgtgagttttgtgcttcttattataggtcctgtgtctgatgctgatgaatcaccatctcctgattctactacctcacctcctgagattcaagcacctgttcctgtggacgtgcgcaagcccattcctgtgaagcttaagcctgggaaacgtccagcagtggaaaaacttgaggacttgttacagggtggggacggacctttggacttgagtacacggaaacgtccaagacaataagtgttccatatccgtgtttacttaaggtgacgtcaatatttgtgtgacagtgcaatgtaataaaaatatgttaactgttcactggtttttattgctttttgggcggggactcaggtatataagtagaagcagacctgtgtggttagctcataggagctggctttcatccatggaggtttgggccattttggaagaccttaggaagactaggcaactgttagagaacgcttcggacggagtctccggtttttggagattctggttcgctagtgaattagctagggtagtttttaggataaaacaggactataaacaagaatttgaaaagttgttggtagattgcccaggactttttgaagctcttaatttgggccatcaggttcactttaaagaaaaagttttatcagttttagacttttcaaccccaggtagaactgctgctgctgtggcttttcttacttttatattagataaatggatcccgcagactcatttcagcaggggatacgttttggatttcatagccacagcattgtggagaacatggaaggttcgcaagatgaggacaatcttaggttactggccagtgcagcctttgggtgtagcgggaatcctgaggcatccaccggtcatgccagcggttctggaggaggaacagcaagaggacaacccgagagccggcctggaccctccagtggaggaggcggagtagctgacttgtctcctgaactgcaacgggtgcttactggatctacgtccactggacgggataggggcgttaagagggagagggcatctagtggtactgatgctagatctgagttggctttaagtttaatgagtcgcagacgtcctgaaaccatttggtggcatgaggttcagaaagagggaagggatgaagtttctgtattgcaggagaaatattcactggaacaggtgaaaacatgttggttggagcctgaggatgattgggaggtggccattaaaaattatgccaagatagctttgaggcctgataaacagtataagattactagacggattaatatccggaatgcttgttacatatctggaaatggggctgaggtggtaatagatactcaagacaaggcagttattagatgctgcatgatggatatgtggcctggggtagtcggtatggaagcagtaacttttgtaaatgttaagtttaggggagatggttataatggaatagtgtttatggccaataccaaacttatattgcatggttgtagcttttttggtttcaacaatacctgtgtagatgcctggggacaggttagtgtacggggatgtagtttctatgcgtgttggattgccacagctggcagaaccaagagtcaattgtctctgaagaaatgcatatttcaaagatgtaacctgggcattctgaatgaaggcgaagcaagggtccgccactgcgcttctacagatactggatgttttattttgattaagggaaatgccagcgtaaagcataacatgatttgcggtgcttccgatgagaggccttatcaaatgctcacttgtgctggtgggcattgtaatatgctggctactgtgcatattgtttcccatcaacgcaaaaaatggcctgtttttgatcacaatgtgatgacgaagtgtaccatgcatgcaggtgggcgtagaggaatgtttatgccttaccagtgtaacatgaatcatgtgaaagtgttgttggaaccagatgccttttccagaatgagcctaacaggaatttttgacatgaacatgcaaatctggaagatcctgaggtatgatgatacgagatcgagggtacgcgcatgcgaatgcggaggcaagcatgccaggttccagccggtgtgtgtagatgtgactgaagatctcagaccggatcatttggttattgcccgcactggagcagagttcggatccagtggagaagaaactgactaaggtgagtattgggaaaactttggggtgggattttcagatggacagattgagtaaaaatttgttttttctgtcttgcagctgtcatgagtggaaacgcttcttttaaggggggagtcttcagcccttatctgacagggcgtctcccatcctgggcaggagttcgtcagaatgttatgggatctactgtggatggaagacccgtccaacccgccaattcttcaacgctgacctatgctactttaagttcttcacctttggacgcagctgcagctgccgccgccgcttctgttgccgctaacactgtgcttggaatgggttactatggaagcatcatggctaattccacttcctctaataacccttctaccctgactcaggacaagttacttgtccttttggcccagctggaggctttgacccaacgtctgggtgaactttctcagcaggtggtcgagttgcgagtacaaactgagtctgctgtcggcacggcaaagtctaaataaaaaaatcccagaatcaatgaataaataaacaagcttgttgttgatttaaaatcaagtgtttttatttcatttttcgcgcacggtatgccctagaccaccgatctctatcattgagaactcggtggattttttccaggatcctatagaggtgggattgaatgtttagatacatgggcattaggccgtctttggggtggagatagctccattgaagggattcatgctccggggtagtgttgtaaatcacccagtcataacaaggtcgcagtgcatggtgttgcacaatatcttttagaagtaggctgattgccacagataagcccttggtgtaggtgtttacaaaccggttgagctgggatgggtgcattcggggtgaaattatgtgcattttggattggatttttaagttggcaatattgccgccaagatcccgtcttgggttcatgttatgaaggaccaccaagacggtgtatccggtacatttaggaaatttatcgtgcagcttggatggaaaagcgtggaaaaatttggagacacccttgtgtcctccaagattttccatgcactcatccatgataatagcaatggggccgtgggcagcggcgcgggcaaacacgttccgtgggtctgacacatcatagttatgttcctgagttaaatcatcataagccattttaatgaatttggggcggagagtaccagattggggtatgaatgttccttcgggccccggagcatagttcccctcacagatttgcatttcccaagctttcagttccgagggtggaatcatgtccacctggggggctatgaaaaacaccgtttctggggcgggggtgattaattgtgatgatagcaaatttctgagcaattgagatttgccacatccggtggggccataaatgattccgattacgggttgcaggtggtagtttagggaacggcaactgccgtcttctcgaagcaagggggccacctcgttcatcatttcccttacatgcatattttcccgcaccaaatccattaggaggcgctctcctcctagtgatagaagttcttgtagtgaggaaaagtttttcagcggtttcagaccgtcagccatgggcattttggagagagtttgctgcaaaagttctagtctgttccacagttcagtgatgtgttctatggcatctcgatccagcagacctcctcgtttcgcgggtttggacggctcctggaatagggtatgagacgatgggcgtccagcgctgccagggttcggtccttccagggtctcagtgttcgagtcagggttgtttccgtcacagtgaaggggtgtgcgcctgcttgggcgcttgccagggtgcgcttcagactcatcctgctggtcgaaaacttctgtcgcttggcgccctgtatgtcggccaagtagcagtttaccatgagttcgtagttgagcgcctcggctgcgtggcctttggcgcggagcttacctttggaagttttcttgcataccgggcagtataggcatttcagcgcatacaacttgggcgcaaggaaaacggattctggggagtatgcatctgcgccgcaggaggcgcaaacagtttcacattccaccagccaggttaaatccggttcattggggtcaaaaacaagttttccgccatattttttgatgcgtttcttacctttggtctccatgagttcgtgtcctcgttgagtgacaaacaggctgtccgtgtccccgtagactgattttacaggcctcttctccagtggagtgcctcggtcttcttcgtacaggaactctgaccactctgatacaaaggcgcgcgtccaggccagcacaaaggaggctatgtgggaggggtagcgatcgttgtcaaccagggggtccaccttttccaaagtatgcaaacacatgtcaccctcttcaacatccaggaatgtgattggcttgtaggtgtatttcacgtgacctggggtccccgctgggggggtataaaagggggcggttctttgctcttcctcactgtcttccggatcgctgtccaggaacgtcagctgttggggtaggtattccctctcgaaggcgggcatgacctctgcactcaggttgtcagtttctaagaacgaggaggatttgatattgacagtgccggttgagatgcctttcatgaggttttcgtccatctggtcagaaaacacaatttttttattgtcaagtttggtggcaaatgatccatacagggcgttggataaaagtttggcaatggatcgcatggtttggttcttttccttgtccgcgcgctctttggcggcgatgttgagttggacatactcgcgtgccaggcacttccattcggggaagatagttgttaattcatctggcacgattctcacttgccaccctcgattatgcaaggtaattaaatccacactggtggccacctcgcctcgaaggggttcattggtccaacagagcctacctcctttcctagaacagaaagggggaagtgggtctagcataagttcatcgggagggtctgcatccatggtaaagattcccggaagtaaatccttatcaaaatagctgatgggagtggggtcatctaaggccatttgccattctcgagctgccagtgcgcgctcatatgggttaaggggactgccccatggcatgggatgggtgagtgcagaggcatacatgccacagatgtcatagacgtagatgggatcctcaaagatgcctatgtaggttggatagcatcgcccccctctgatacttgctcgcacatagtcatatagttcatgtgatggcgctagcagccccggacccaagttggtgcgattgggtttttctgttctgtagacgatctggcgaaagatggcgtgagaattggaagagatggtgggtctttgaaaaatgttgaaatgggcatgaggtagacctacagagtctctgacaaagtgggcataagattcttgaagcttggttaccagttcggcggtgacaagtacgtctagggcgcagtagtcaagtgtttcttgaatgatgtcataacctggttggtttttcttttcccacagttcgcggttgagaaggtattcttcgcgatccttccagtactcttctagcggaaacccgtctttgtctgcacggtaagatcctagcatgtagaactgattaactgccttgtaagggcagcagcccttctctacgggtagagagtatgcttgagcagcttttcgtagcgaagcgtgagtaagggcaaaggtgtctctgaccatgactttgaggaattggtatttgaagtcgatgtcgtcacaggctccctgttcccagagttggaagtctacccgtttcttgtaggcggggttgggcaaagcgaaagtaacatcattgaagagaatcttgccggccctgggcatgaaattgcgagtgatgcgaaaaggctgtggtacttccgctcggttattgataacctgggcagctaggacgatctcgtcgaaaccgttgatgttgtgtcctacgatgtataattctatgaaacgcggcgtgcctctgacgtgaggtagcttactgagctcatcaaaggttaggtctgtggggtcagataaggcgtagtgttcgagagcccattcgtgcaggtgaggattcgctttaaggaaggaggaccagaggtccactgccagtgctgtttgtaactggtcccggtactgacgaaaatgccgtccgactgccattttttctggggtgacgcaatagaaggtttgggggtcctgccgccagcgatcccacttgagttttatggcgaggtcataggcgatgttgacgagccgctggtctccagagagtttcatgaccagcatgaaggggattagctgcttgccaaaggaccccatccaggtgtaggtttccacatcgtaggtgagaaagagcctttctgtgcgaggatgagagccaatcgggaagaactggatctcctgccaccagttggaggaatggctgttgatgtgatggaagtagaactccctgcgacgcgccgagcattcatgcttgtgcttgtacagacggccgcagtagtcgcagcgttgcacgggttgtatctcgtgaatgagttgtacctggcttcccttgacgagaaatttcagtgggaagccgaggcctggcgattgtatctcgtgctttactatgttgtctgcatcggcctgttcatcttctgtctcgatggtggtcatgctgacgagccctcgcgggaggcaagtccagacctcggcgcggcaggggcggagctcgaggacgagagcgcgcaggctggagctgtccagggtcctgagacgctgcggactcaggttagtaggcagtgtcaggagattaacttgcatgatcttttggagggcgtgcgggaggttcagatagtacttgatctcaacgggtccgttggtggagatgtcgatggcttgcagggttccgtgtcccttgggcgctaccaccgtgcccttgtttttcattttggacggcggtggctctgttgcttcttgcatgtttagaagcggtgtcgagggcgcgcaccgggcggcaggggcggctcgggacccggcggcatggctggcagtggtacgtcggcgccgcgcgcgggtaggttctggtactgcgccctgagaagactcgcatgcgcgacgacgcggcggttgacatcctggatctgacgcctctgggtgaaagctaccggccccgtgagcttgaacctgaaagagagttcaacagaatcaatctcggtatcgttgacggcggcttgcctaaggatttcttgcacgtcaccagagttgtcctggtaggcgatctccgccatgaactgctcgatctcttcctcttgaagatctccgcggcccgctctctcgacggtggccgcgaggtcgttggagatgcgcccaatgagttgagagaatgcattcatgcccgcctcgttccagacgcggctgtagaccacggcccccacgggatctctcgcgcgcatgaccacctgggcgaggttgagctccacgtggcgggtgaagaccgcatagttgcataggcgctggaaaaggtagttgagtgtggtggcgatgtgctcggtgacgaagaaatacatgatccatcgtctcagcggcatctcgctgacatcgcccagagcttccaagcgctccatggcctcgtagaagtccacggcaaaattaaaaaactgggagtttcgcgcggacacggtcaactcctcttccagaagacggataagttcggcgatggtggtgcgcacctcgcgctcgaaagcccctgggatttcttcctcaatctcttcttcttccactaacatctcttcctcttcaggtggggctgcaggaggagggggaacgcggcgacgccggcggcgcacgggcagacggtcgatgaatctttcaatgacctctccgcggcggcggcgcatggtttcagtgacggcgcggccgttctcgcgcggtcgcagagtaaaaacaccgccgcgcatctccttaaagtggtgactgggaggttctccgtttgggagggagagggcgctgattatacattttattaattggcccgtagggactgcacgcagagatctgatcgtgtcaagatccacgggatctgaaaacctttcgacgaaagcgtctaaccagtcacagtcacaaggtaggctgagtacggcttcttgtgggcgggggtggttatgtgttcggtctgggtcttctgtttcttcttcatctcgggaaggtgagacgatgctgctggtgatgaaattaaagtaggcagttctaagacggcggatggtggcgaggagcaccaggtctttgggtccggcttgctggatacgcaggcgattggccattccccaagcattatcctgacatctagcaagatctttgtagtagtcttgcatgagccgttctacgggcacttcttcctcacccgttctgccatgcatacgtgtgagtccaaatccgcgcattggttgtaccagtgccaagtcagctacgactctttcggcgaggatggcttgctgtacttgggtaagggtggcttgaaagtcatcaaaatccacaaagcggtggtaagctcctgtattaatggtgtaagcacagttggccatgactgaccagttaactgtctggtgaccagggcgcacgagctcggtgtatttaaggcgcgaataggcgcgggtgtcaaagatgtaatcgttgcaggtgcgcaccagatactggtaccctataagaaaatgcggcggtggttggcggtagagaggccatcgttctgtagctggagcgccaggggcgaggtcttccaacataaggcggtgatagccgtagatgtacctggacatccaggtgattcctgcggcggtagtagaagcccgaggaaactcgcgtacgcggttccaaatgttgcgtagcggcatgaagtagttcattgtaggcacggtttgaccagtgaggcgcgcgcagtcattgatgctctatagacacggagaaaatgaaagcgttcagcgactcgactccgtagcctggaggaacgtgaacgggttgggtcgcggtgtaccccggttcgagacttgtactcgagccggccggagccgcggctaacgtggtattggcactcccgtctcgacccagcctacaaaaatccaggatacggaatcgagtcgttttgctggtttccgaatggcagggaagtgagtcctattttttttttttgccgctcagatgcatcccgtgctgcgacagatgcgcccccaacaacagcccccctcgcagcagcagcagcagcaatcacaaaaggctgtccctgcaactactgcaactgccgccgtgagcggtgcgggacagcccgcctatgatctggacttggaagagggcgaaggactggcacgtctaggtgcgccttcacccgagcggcatccgcgagttcaactgaaaaaagattctcgcgaggcgtatgtgccccaacagaacctatttagagacagaagcggcgaggagccggaggagatgcgagcttcccgctttaacgcgggtcgtgagctgcgtcacggtttggaccgaagacgagtgttgcgggacgaggatttcgaagttgatgaaatgacagggatcagtcctgccagggcacacgtggctgcagccaaccttgtatcggcttacgagcagacagtaaaggaagagcgtaacttccaaaagtcttttaataatcatgtgcgaaccctgattgcccgcgaagaagttacccttggtttgatgcatttgtgggatttgatggaagctatcattcagaaccctactagcaaacctctgaccgcccagctgtttctggtggtgcaacacagcagagacaatgaggctttcagagaggcgctgctgaacatcaccgaacccgaggggagatggttgtatgatcttatcaacattctacagagtatcatagtgcaggagcggagcctgggcctggccgagaaggtggctgccatcaattactcggttttgagcttgggaaaatattacgctcgcaaaatctacaagactccatacgttcccatagacaaggaggtgaagatagatgggttctacatgcgcatgacgctcaaggtcttgaccctgagcgatgatcttggggtgtatcgcaatgacagaatgcatcgcgcggttagcgccagcaggaggcgcgagttaagcgacagggaactgatgcacagtttgcaaagagctctgactggagctggaaccgagggtgagaattacttcgacatgggagctgacttgcagtggcagcctagtcgcagggctctgagcgccgcgacggcaggatgtgagcttccttacatagaagaggcggatgaaggcgaggaggaagagggcgagtacttggaagactgatggcacaacccgtgttttttgctagatggaacagcaagcaccggatcccgcaatgcgggcggcgctgcagagccagccgtccggcattaactcctcggacgattggacccaggccatgcaacgtatcatggcgttgacgactcgcaaccccgaagcctttagacagcaaccccaggccaaccgtctatcggccatcatggaagctgtagtgccttcccgctctaatcccactcatgagaaggtcctggccatcgtgaacgcgttggtggagaacaaagctattcgtccagatgaggccggactggtatacaacgctctcttagaacgcgtggctcgctacaacagtagcaatgtgcaaaccaatttggaccgtatgataacagatgtacgcgaagccgtgtctcagcgcgaaaggttccagcgtgatgccaacctgggttcgctggtggcgttaaatgctttcttgagtactcagcctgctaatgtgccgcgtggtcaacaggattatactaactttttaagtgctttgagactgatggtatcagaagtacctcagagcgaagtgtatcagtccggtcctgattacttctttcagactagcagacagggcttgcagacggtaaatctgagccaagcttttaaaaaccttaaaggtttgtggggagtgcatgccccggtaggagaaagagcaaccgtgtctagcttgttaactccgaactcccgcctattattactgttggtagctcctttcaccgacagcggtagcatcgaccgtaattcctatttgggttacctactaaacctgtatcgcgaagccatagggcaaagtcaggtggacgagcagacctatcaagaaattacccaagtcagtcgcgctttgggacaggaagacactggcagtttggaagccactctgaacttcttgcttaccaatcggtctcaaaagatccctcctcaatatgctcttactgcggaggaggagaggatccttagatatgtgcagcagagcgtgggattgtttctgatgcaagagggggcaactccgactgcagcactggacatgacagcgcgaaatatggagcccagcatgtatgccagtaaccgacctttcattaacaaactgctggactacttgcacagagctgccgctatgaactctgattatttcaccaatgccatcttaaacccgcactggctgcccccacctggtttctacacgggcgaatatgacatgcccgaccctaatgacggatttctgtgggacgacgtggacagcgatgttttttcacctctttctgatcatcgcacgtggaaaaaggaaggcggcgatagaatgcattcttctgcatcgctgtccggggtcatgggtgctaccgcggctgagcccgagtctgcaagtccttttcctagtctacccttttctctacacagtgtacgtagcagcgaagtgggtagaataagtcgcccgagtttaatgggcgaagaggagtatctaaacgattccttgctcagaccggcaagagaaaaaaatttcccaaacaatggaatagaaagtttggtggataaaatgagtagatggaagacttatgctcaggatcacagagacgagcctgggatcatggggattacaagtagagcgagccgtagacgccagcgccatgacagacagaggggtcttgtgtgggacgatgaggattcggccgatgatagcagcgtgctggacttgggtgggagaggaaggggcaacccgtttgctcatttgcgccctcgcttgggtggtatgttgtaaaaaaaaataaaaaaaaaactcaccaaggccatggcgacgagcgtacgttcgttcttctttattatctgtgtctagtataatgaggcgagtcgtgctaggcggagcggtggtgtatccggagggtcctcctccttcgtacgagagcgtgatgcagcagcagcaggcgacggcggtgatgcaatccccactggaggctccctttgtgcctccgcgatacctggcacctacggagggcagaaacagcattcgttattcggaactggcacctcagtacgataccaccaggttgtatctggtggacaacaagtcggcggacattgcttctctgaactatcagaatgaccacagcaacttcttgaccacggtggtgcaaaacaatgactttacccctacggaagccagcacccagaccattaactttgatgaacgatcgcggtggggcggtcagctaaagaccatcatgcatactaacatgccaaacgtgaacgagtatatgtttagtaacaagttcaaagcgcgtgtgatggtgtccagaaaacctcccgacggtgctgcagttggggatacttatgatcacaagcaggatattttgaaatatgagtggttcgagtttactttgccagaaggcaacttttcagttactatgactattgatttgatgaacaatgccatcatagataattacttgaaagtgggtagacagaatggagtgcttgaaagtgacattggtgttaagttcgacaccaggaacttcaagctgggatgggatcccgaaaccaagttgatcatgcctggagtgtatacgtatgaagccttccatcctgacattgtcttactgcctggctgcggagtggattttaccgagagtcgtttgagcaaccttcttggtatcagaaaaaaacagccatttcaagagggttttaagattttgtatgaagatttagaaggtggtaatattccggccctcttggatgtagatgcctatgagaacagtaagaaagaacaaaaagccaaaatagaagctgctacagctgctgcagaagctaaggcaaacatagttgccagcgactctacaagggttgctaacgctggagaggtcagaggagacaattttgcgccaacacctgttccgactgcagaatcattattggccgatgtgtctgaaggaacggacgtgaaactcactattcaacctgtagaaaaagatagtaagaatagaagctataatgtgttggaagacaaaatcaacacagcctatcgcagttggtatctttcgtacaattatggcgatcccgaaaaaggagtgcgttcctggacattgctcaccacctcagatgtcacctgcggagcagagcaggtctactggtcgcttccagacatgatgaaggatcctgtcactttccgctccactagacaagtcagtaactaccctgtggtgggtgcagagcttatgcccgtcttctcaaagagcttctacaacgaacaagctgtgtactcccagcagctccgccagtccacctcgcttacgcacgtcttcaaccgctttcctgagaaccagattttaatccgtccgccggcgcccaccattaccaccgtcagtgaaaacgttcctgctctcacagatcacgggaccctgccgttgcgcagcagtatccggggagtccaacgtgtgaccgttactgacgccagacgccgcacctgtccctacgtgtacaaggcactgggcatagtcgcaccgcgcgtcctttcaagccgcactttctaaaaaaaaaaaaaatgtccattcttatctcgcccagtaataacaccggttggggtctgcgcgctccaagcaagatgtacggaggcgcacgcaaacgttctacccaacatcctgtccgtgttcgcggacattttcgcgctccatggggcgccctcaagggccgcactcgcgttcgaaccaccgtcgatgatgtaatcgatcaggtggttgccgacgcccgtaattatactcctactgcgcctacatctactgtggatgcagttattgacagtgtagtggctgacgctcgcaactatgctcgacgtaagagccggcgaaggcgcattgccagacgccaccgagctaccactgccatgcgagccgcaagagctctgctacgaagagctagacgcgtggggcgaagagccatgcttagggcggccagacgtgcagcttcgggcgccagcgccggcaggtcccgcaggcaagcagccgctgtcgcagcggcgactattgccgacatggcccaatcgcgaagaggcaatgtatactgggtgcgtgacgctgccaccggtcaacgtgtacccgtgcgcacccgtccccctcgcacttagaagatactgagcagtctccgatgttgtgtcccagcggcgaggatgtccaagcgcaaatacaaggaagaaatgctgcaggttatcgcacctgaagtctacggccaaccgttgaaggatgaaaaaaaaccccgcaaaatcaagcgggttaaaaaggacaaaaaagaagaggaagatggcgatgatgggctggcggagtttgtgcgcgagtttgccccacggcgacgcgtgcaatggcgtgggcgcaaagttcgacatgtgttgagacctggaacttcggtggtctttacacccggcgagcgttcaagcgctacttttaagcgttcctatgatgaggtgtacggggatgatgatattcttgagcaggcggctgaccgattaggcgagtttgcttatggcaagcgtagtagaataacttccaaggatgagacagtgtcgatacccttggatcatggaaatcccacccctagtcttaaaccggtcactttgcagcaagtgttacccgtaactccgcgaacaggtgttaaacgcgaaggtgaagatttgtatcccactatgcaactgatggtacccaaacgccagaagttggaggacgttttggagaaagtaaaagtggatccagatattcaacctgaggttaaagtgagacccattaagcaggtagcgcctggtctgggggtacaaactgtagacattaagattcccactgaaagtatggaagtgcaaactgaacccgcaaagcctactgccacctccactgaagtgcaaacggatccatggatgcccatgcctattacaactgacgccgccggtcccactcgaagatcccgacgaaagtacggtccagcaagtctgttgatgcccaattatgttgtacacccatctattattcctactcctggttaccgaggcactcgctactatcgcagccgaaacagtacctcccgccgtcgccgcaagacacctgcaaatcgcagtcgtcgccgtagacgcacaagcaaaccgactcccggcgccctggtgcggcaagtgtaccgcaatggtagtgcggaacctttgacactgccgcgtgcgcgttaccatccgagtatcatcacttaatcaatgttgccgctgcctccttgcagatatggccctcacttgtcgccttcgcgttcccatcactggttaccgaggaagaaactcgcgccgtagaagagggatgttgggacgcggaatgcgacgctacaggcgacggcgtgctatccgcaagcaattgcggggtggttttttaccagccttaattccaattatcgctgctgcaattggcgcgataccaggcatagcttccgtggcggttcaggcctcgcaacgacattgacattggaaaaaaacgtataaataaaaaaaaaaaaatacaatggactctgacactcctggtcctgtgactatgttttcttagagatggaagacatcaatttttcatccttggctccgcgacacggcacgaagccgtacatgggcacctggagcgacatcggcacgagccaactgaacgggggcgccttcaattggagcagtatctggagcgggcttaaaaattttggctcaaccataaaaacatacgggaacaaagcttggaacagcagtacaggacaggcgcttagaaataaacttaaagaccagaacttccaacaaaaagtagtcgatgggatagcttccggcatcaatggagtggtagatttggctaaccaggctgtgcagaaaaagataaacagtcgtttggacccgccgccagcaaccccaggtgaaatgcaagtggaggaagaaattcctccgccagaaaaacgaggcgacaagcgtccgcgtcccgatttggaagagacgctggtgacgcgcgtagatgaaccgccttcttatgaggaagcaacgaagcttggaatgcccaccactagaccgatagccccaatggccaccggggtgatgaaaccttctcagttgcatcgacccgtcaccttggatttgccccctccccctgctgctactgctgtacccgcttctaagcctgtcgctgccccgaaaccagtcgccgtagccaggtcacgtcccgggggcgctcctcgtccaaatgcgcactggcaaaatactctgaacagcatcgtgggtctaggcgtgcaaagtgtaaaacgccgtcgctgcttttaattaaatatggagtagcgcttaacttgcctatctgtgtatatgtgtcattacacgccgtcacagcagcagaggaaaaaaggaagaggtcgtgcgtcgacgctgagttactttcaagatggccaccccatcgatgctgccccaatgggcatacatgcacatcgccggacaggatgcttcggagtacctgagtccgggtctggtgcagttcgcccgcgccacagacacctacttcaatctgggaaataagtttagaaatcccaccgtagcgccgacccacgatgtgaccaccgaccgtagccagcggctcatgttgcgcttcgtgcccgttgaccgggaggacaatacatactcttacaaagtgcggtacaccctggccgtgggcgacaacagagtgctggatatggccagcacgttctttgacattaggggtgtgttggacagaggtcccagtttcaaaccctattctggtacggcttacaactccctggctcctaaaggcgctccaaatacatctcagtggattgcagaaggtgtaaaaaatacaactggtgaggaacacgtaacagaagaggaaaccaatactactacttacacttttggcaatgctcctgtaaaagctgaagctgaaattacaaaagaaggactcccagtaggtttggaagtttcagatgaagaaagtaaaccgatttatgctgataaaacatatcagccagaacctcagctgggagatgaaacttggactgaccttgatggaaaaaccgaaaagtatggaggcagggctctcaaacccgatactaagatgaaaccatgctacgggtcctttgccaaacctactaatgtgaaaggcggtcaggcaaaacaaaaaacaacggagcagccaaatcagaaagtcgaatatgatatcgacatggagttttttgatgcggcatcgcagaaaacaaacttaagtcctaaaattgtcatgtatgcagaaaatgtaaatttggaaactccagacactcatgtagtgtacaaacctggaacagaagacacaagttccgaagctaatttgggacaacaatctatgcccaacagacccaactacattggcttcagagataactttattggacttatgtactataacagtactggtaacatgggggtgctggctggtcaagcgtctcagttaaatgcagtggttgacttgcaggacagaaacacagaactttcttaccaactcttgcttgactctctgggcgacagaaccagatactttagcatgtggaatcaggctgtggacagttatgatcctgatgtacgtgttattgaaaatcatggtgtggaagatgaacttcccaactactgttttccactggacggcataggtgttccaacaaccagttacaaatcaatagttccaaatggagacaatgcgcctaattggaaggaacctgaagtaaatggaacaagtgagatcggacagggtaatttgtttgccatggaaattaaccttcaagccaatctatggcgaagtttcctttattccaatgtggctctatatctcccagactcgtacaaatacaccccgtccaatgtcactcttccagaaaacaaaaacacctacgactacatgaacgggcgggtggtgccgccatctctagtagacacctatgtgaacattggtgccaggtggtctctggatgccatggacaatgtcaacccattcaaccaccaccgtaacgctggcttgcgttaccgatccatgcttctgggtaacggacgttatgtgcctttccacatacaagtgcctcaaaaattcttcgctgttaaaaacctgctgcttctcccaggctcctacacttatgagtggaactttaggaaggatgtgaacatggttctacagagttccctcggtaacgacctgcgggtagatggcgccagcatcagtttcacgagcatcaacctctatgctacttttttccccatggctcacaacaccgcttccacccttgaagccatgctgcggaatgacaccaatgatcagtcattcaacgactacctatctgcagctaacatgctctaccccattcctgccaatgcaaccaatattcccatttccattccttctcgcaactgggcggctttcagaggctggtcatttaccagactgaaaaccaaagaaactccctctttggggtctggatttgacccctactttgtctattctggttctattccctacctggatggtaccttctacctgaaccacacttttaagaaggtttccatcatgtttgactcttcagtgagctggcctggaaatgacaggttactatctcctaacgaatttgaaataaagcgcactgtggatggcgaaggctacaacgtagcccaatgcaacatgaccaaagactggttcttggtacagatgctcgccaactacaacatcggctatcagggcttctacattccagaaggatacaaagatcgcatgtattcatttttcagaaacttccagcccatgagcaggcaggtggttgatgaggtcaattacaaagacttcaaggccgtcgccataccctaccaacacaacaactctggctttgtgggttacatggctccgaccatgcgccaaggtcaaccctatcccgctaactatccctatccactcattggaacaactgccgtaaatagtgttacgcagaaaaagttcttgtgtgacagaaccatgtggcgcataccgttctcgagcaacttcatgtctatgggggcccttacagacttgggacagaatatgctctatgccaactcagctcatgctctggacatgacctttgaggtggatcccatggatgagcccaccctgctttatcttctcttcgaagttttcgacgtggtcagagtgcatcagccacaccgcggcatcatcgaggcagtctacctgcgtacaccgttctcggccggtaacgctaccacgtaagaagcttcttgcttcttgcaaatagcagctgcaaccatggcctgcggatcccaaaacggctccagcgagcaagagctcagagccattgtccaagacctgggttgcggaccctattttttgggaacctacgataagcgcttcccggggttcatggcccccgataagctcgcctgtgccattgtaaatacggccggacgtgagacggggggagagcactggttggctttcggttggaacccacgttctaacacctgctacctttttgatccttttggattctcggatgatcgtctcaaacagatttaccagtttgaatatgagggtctcctgcgccgcagcgctcttgctaccaaggaccgctgtattacgctggaaaaatctacccagaccgtgcagggtccccgttctgccgcctgcggacttttctgctgcatgttccttcacgcctttgtgcactggcctgaccgtcccatggacggaaaccccaccatgaaattgctaactggagtgccaaacaacatgcttcattctcctaaagtccagcccaccctgtgtgacaatcaaaaagcactctaccattttcttaatacccattcgccttattttcgctcccatcgtacacacatcgaaagggccactgcgttcgaccgtatggatgttcaataatgactcatgtaaacaacgtgttcaataaacatcactttatttttttacatgtatcaaggctctgcattacttatttatttacaagtcgaatgggttctgacgagaatcagaatgacccgcaggcagtgatacgttgcggaactgatacttgggttgccacttgaattcgggaatcaccaacttgggaaccggtatatcgggcaggatgtcactccacagctttctggtcagctgcaaagctccaagcaggtcaggagccgaaatcttgaaatcacaattaggaccagtgctttgagcgcgagagttgcggtacaccggattgcagcactgaaacaccatcagcgacggatgtctcacgcttgccagcacggtgggatctgcaatcatgcccacatccagatcttcagcattggcaatgctgaacggggtcatcttgcaggtctgcctacccatggcgggcacccaattaggcttgtggttgcaatcgcagtgcagggggatcagtatcatcttggcctgatcctgtctgattcctggatacacggctctcatgaaagcatcatattgcttgaaagcctgctgggctttactaccctcggtataaaacatcccgcaggacctgctcgaaaactggttagctgcacagccggcatcattcacacagcagcgggcgtcattgttagctatttgcaccacacttctgccccagcggttttgggtgattttggttcgctcgggattctcctttaaggctcgttgtccgttctcgctggccacatccatctcgataatctgctccttctgaatcataatattgccatgcaggcacttcagcttgccctcataatcattgcagccatgaggccacaacgcacagcctgtacattcccaattatggtgggcgatctgagaaaaagaatgtatcattccctgcagaaatcttcccatcatcgtgctcagtgtcttgtgactagtgaaagttaactggatgcctcggtgctcctcgtttacgtactggtgacagatgcgcttgtattgttcgtgttgctcaggcattagtttaaaagaggttctaagttcgttatccagcctgtacttctccatcagcagacacatcacttccatgcctttctcccaagcagacaccaggggcaagctaatcggattcttaacagtgcaggcagcagctcctttagccagagggtcatctttagcgatcttctcaatgcttcttttgccatccttctcaacgatgcgcacgggcgggtagctgaaacccactgctacaagttgcgcctcttctctttcttcttcgctgtcttgactgatgtcttgcatggggatatgtttggtcttccttggcttctttttggggggtatcggaggaggaggactgtcgctccgttccggagacagggaggattgtgacgtttcgctcaccattaccaactgactgtcggtagaagaacctgaccccacacggcgacaggtgtttctcttcgggggcagaggtggaggcgattgcgaagggctgcggtccgacctggaaggcggatgactggcagaaccccttccgcgttcgggggtgtgctccctgtggcggtcgcttaactgatttccttcgcggctggccattgtgttctcctaggcagagaaacaacagacatggaaactcagccattgctgtcaacatcgccacgagtgccatcacatctcgtcctcagcgacgaggaaaaggagcagagcttaagcattccaccgcccagtcctgccaccacctctaccctagaagataaggaggtcgacgcatctcatgacatgcagaataaaaaagcgaaagagtctgagacagacatcgagcaagacccgggctatgtgacaccggtggaacacgaggaagagttgaaacgctttctagagagagaggatgaaaactgcccaaaacaacgagcagataactatcaccaagatgctggaaatagggatcagaacaccgactacctcatagggcttgacggggaagacgcgctccttaaacatctagcaagacagtcgctcatagtcaaggatgcattattggacagaactgaagtgcccatcagtgtggaagagctcagccgcgcctacgagcttaacctcttttcacctcgtactccccccaaacgtcagccaaacggcacctgcgagccaaatcctcgcttaaacttttatccagcttttgctgtgccagaagtactggctacctatcacatcttttttaaaaatcaaaaaattccagtctcctgccgcgctaatcgcacccgcgccgatgccctactcaatctgggacctggttcacgcttacctgatatagcttccttggaagaggttccaaagatcttcgagggtctgggcaataatgagactcgggccgcaaatgctctgcaaaagggagaaaatggcatggatgagcatcacagcgttctggtggaattggaaggcgataatgccagactcgcagtactcaagcgaagcatcgaggtcacacacttcgcatatcccgctgtcaacctgccccctaaagtcatgacggcggtcatggaccagttactcattaagcgcgcaagtcccctttcagaagacatgcatgacccagatgcctgtgatgagggtaaaccagtggtcagtgatgagcagctaacccgatggctgggcaccgactctcccagggatttggaagagcgtcgcaagcttatgatggccgtggtgctggttaccgtagaactagagtgtctccgacgtttctttaccgattcagaaaccttgcgcaaactcgaagagaatctgcactacacttttagacacggctttgtgcggcaggcatgcaagatatctaacgtggaactcaccaacctggtttcctacatgggtattctgcatgagaatcgcctaggacaaagcgtgctgcacagcaccctgaagggggaagcccgccgtgattacatccgcgattgtgtctatctgtacctgtgccacacgtggcaaaccggcatgggtgtatggcagcaatgtttagaagaacagaacttgaaagagcttgacaagctcttacagaaatctcttaaggttctgtggacagggttcgacgagcgcaccgtcgcttccgacctggcagacctcatcttcccagagcgtctcagggttactttgcgaaacggattgcctgactttatgagccagagcatgcttaacaattttcgctctttcatcctggaacgctccggtatcctgcccgccacctgctgcgcactgccctccgactttgtgcctctcacctaccgcgagtgccccccgccgctatggagtcactgctacctgttccgtctggccaactatctctcctaccactcggatgtgatcgaggatgtgagcggagacggcttgctggagtgtcactgccgctgcaatctgtgcacgccccaccggtccctagcttgcaacccccagttgatgagcgaaacccagataataggcacctttgaattgcaaggccccagcagccaaggcgatgggtcttctcctgggcaaagtttaaaactgaccccgggactgtggacctccgcctacttgcgcaagtttgctccggaagattaccacccctatgaaatcaagttctatgaggaccaatcacagcctccaaaggccgaactttcggcctgcgtcatcacccagggggcaattctggcccaattgcaagccatccaaaaatcccgccaagaatttctactgaaaaagggtaagggggtctaccttgacccccagaccggcgaggaactcaacacaaggttccctcaggatgtcccaacgacgagaaaacaagaagttgaaggtgcagccgccgcccccagaagatatggaggaagattgggacagtcaggcagaggaggcggaggaggacagtctggaggacagtctggaggaagacagtttggaggaggaaaacgaggaggcagaggaggtggaagaagtaaccgccgacaaacagttatcctcggctgcggagacaagcaacagcgctaccatctccgctccgagtcgaggaacccggcggcgtcccagcagtagatgggacgagaccggacgcttcccgaacccaaccagcgcttccaagaccggtaagaaggatcggcagggatacaagtcctggcgggggcataagaatgccatcatctcctgcttgcatgagtgcgggggcaacatatccttcacgcggcgctacttgctattccaccatggggtgaactttccgcgcaatgttttgcattactaccgtcacctccacagcccctactatagccagcaaatcccggcagtctcgacagataaagacagcggcggcgacctccaacagaaaaccagcagcggcagttagaaaatacacaacaagtgcagcaacaggaggattaaagattacagccaacgagccagcgcaaacccgagagttaagaaatcggatctttccaaccctgtatgccatcttccagcagagtcggggtcaagagcaggaactgaaaataaaaaaccgatctctgcgttcgctcaccagaagttgtttgtatcacaagagcgaagatcaacttcagcgcactctcgaggacgccgaggctctcttcaacaagtactgcgcgctgactcttaaagagtaggcagcgaccgcgcttattcaaaaaaggcgggaattacatcatcctcgacatgagtaaagaaattcccacgccttacatgtggagttatcaaccccaaatgggattggcggcaggcgcctcccaggactactccacccgcatgaattggctcagcgccgggccttctatgatttctcgagttaatgatatacgcgcctaccgaaaccaaatacttttggaacagtcagctcttaccaccacgccccgccaacaccttaatcccagaaattggcccgccgccctagtgtaccaggaaagtcccgctcccaccactgtattacttcctcgagacgcccaggccgaagtccaaatgactaatgcaggtgcgcagttagctggcggctccaccctatgtcgtcacaggcctcggcataatataaaacgcctgatgatcagaggccgaggtatccagctcaacgacgagtcggtgagctctccgcttggtctacgaccagacggaatctttcagattgccggctgcgggagatcttccttcacccctcgtcaggctgttctgactttggaaagttcgtcttcgcaaccccgctcgggcggaatcgggaccgttcaatttgtggaggagtttactccctctgtctacttcaaccccttctccggatctcctgggcattacccggacgagttcataccgaacttcgacgcgattagcgagtcagtggacggctacgattgatgtctggtgacgcggctgagctatctcggctgcgacatctagaccactgccgccgctttcgctgctttgcccgggaactcattgagttcatctacttcgaactccccaaggatcaccctcaaggtccggcccacggagtgcggatttctatcgaaggcaaaatagactctcgcctgcaacgaattttctcccagcggcccgtgctgatcgagcgagaccagggaaacaccacggtttccatctactgcatttgtaatcaccccggattgcatgaaagcctttgctgtcttatgtgtactgagtttaataaaaactgaattaagactctcctacggactgccgcttcttcaacccggattttacaaccagaagaacgaaacttttcctgtcgtccaggactctgttaacttcacctttcctactcacaaactagaagctcaacgactacaccgcttttccagaagcattttccctactaatactactttcaaaaccggaggtgagctccaaggtcttcctacagaaaacccttgggtggaagcgggccttgtagtgctaggaattcttgcgggtgggcttgtgattattctttgctacctatacacaccttgcttcactttcttagtggtgttgtggtattggtttaaaaaatggggcccatactagtcttgcttgttttactttcgcttttggaaccgggttctgccaattacgatccatgtctagacttcgacccagaaaactgcacacttacttttgcacccgacacaagccgcatctgtggagttcatcgcctctcttacgaacttggcccccaacgacaaaaatttacctgcatggtgggaatcaaccccatagttatcacccagcaaagtggagatactaagggttgcattcactgctcctgcgattccatcgagtgcacctacaccctgctgaagaccctatgcggcctaagagacctgctaccaatgaattaaaaaatgattaataaaaaatcacttacttgaaatcagcaataaggtctctgttgaaattttctcccagcagcacctcacttccctcttcccaactctggtattctaaaccccgttcagcggcatactttctccatactttaaaggggatgtcaaattttagctcctctcctgtacccacaatcttcatgtctttcttcccagatgaccaagagagtccggctcagtgactccttcaaccctgtctacccctatgaagatgaaagcacctcccaacacccctttataaacccagggtttatttccccaaatggcttcacacaaagcccaaacggagttcttactttaaaatgtttaaccccactaacaaccacaggcggatctctacagctaaaagtgggagggggacttacagtggatgacaccaacggttttttgaaagaaaacataagtgccaccacaccactcgttaagactggtcactctataggtttaccactaggagccggattgggaacgaatgaaaataaactttgtatcaaattaggacaaggacttacattcaattcaaacaacatttgcattgatgacaatattaacaccttatggacaggagtcaaccccaccgaagccaactgtcaaatcatgaactccagtgaatctaatgattgcaaattaattctaacactagttaaaactggagcactagtcactgcatttgtttatgttataggagtatctaacaattttaatatgctaactacacacagaaatataaattttactgcagagctgtttttcgattctactggtaatttactaactagactctcatccctcaaaactccacttaatcataaatcaggacaaaacatggctactggtgccattactaatgctaaaggtttcatgcccagcacgactgcctatcctttcaatgataattctagagaaaaagaaaactacatttacggaacttgttactacacagctagtgatcgcactgcttttcccattgacatatctgtcatgcttaaccgaagagcaataaatgacgagacatcatattgtattcgtataacttggtcctggaacacaggagatgccccagaggtgcaaacctctgctacaaccctagtcacctccccatttaccttttactacatcagagaagacgactgacaaataaagtttgcgatcgccaggcccaccatggactggacctggcgcatcctgttcttggtggcagctgctacgggagctcattccaactgggtgaatgtaataagtgatttgaaaaaaattgaagatcttattcaatctatgcatattgatgctactttatatacggaaagtgatgttcaccccagttgcaaagtaacagcaatgaagtgctttctcttggagttacaagttatttcacttgagtccggagatgcaagtattcatgatacagtagaaaatctgatcatcctagcaaacaacagtttgtcttctaatgggaatgtaacagaatctggatgcaaagaatgtgaggaactggaggaaaaaaatattaaagaatttttgcagagttttgtacatattgtccaaatgttcatcaacacttctggaagcggagctactaacttcagcctgctgaagcaggctggagacgtggaggagaaccctggacctgcccaatctctcgcacttagtctgctcattctcgtgcttgctttcgggattccaagaactcagggaagcgacggcggtgcccaagattgctgtctgaaatatagtcagagaaaaatccctgctaaagtggttcggagttatcgcaaacaagagcccagtttggggtgttcaattcccgcaattctctttttaccacggaaacggtcccaagctgaactgtgcgctgatcctaaagaactgtgggtccaacagctcatgcaacaccttgataaaaccccttctccccaaaagcctgctcaagggggaagcggagagggcagaggaagtctgctaacatgcggtgacgtcgaggagaatcctggacctgccttgacctttgctttactggtggccctcctggtgctcagctgcaagtcaagctgctctgtgggctgtgatctgcctcaaacccacagcctgggtagcaggaggaccttgatgctcctggcacagatgaggagaatctctcttttctcctgcttgaaggacagacatgactttggatttccccaggaggagtttggcaaccagttccaaaaggctgaaaccatccctgtcctccatgagatgatccagcagatcttcaatctcttcagcacaaaggactcatctgctgcttgggatgagaccctcctagacaaattctacactgaactctaccagcagctgaatgacctggaagcctgtgtgatacagggggtgggggtgacagagactcccctgatgaaggaggactccattctggctgtgaggaaatacttccaaagaatcactctctatctgaaagagaagaaatacagcccttgtgcctgggaggttgtcagagcagaaatcatgagatctttttctttgtcaacaaacttgcaagaaagtttaagaagtaaggaaggaagcggacagtgtactaattatgctctcttgaaattggctggagatgttgagagcaaccctggacctaagaaaagtggtgttcttttcctcttgggcatcatcttgctggttctgattggagtgcaaggaaccccagtagtgagaaagggtcgctgttcctgcatcagcaccaaccaagggactatccacctacaatccttgaaagaccttaaacaatttgccccaagcccttcctgcgagaaaattgaaatcattgctacactgaagaatggagttcaaacatgtctaaacccagattcagcagatgtgaaggaactgattaaaaagtgggagaaacaggtcagccaaaagaaaaagcaaaagaatgggaaaaaacatcaaaaaaagaaagttctgaaagttcgaaaatctcaacgttctcgtcaaaagaagactacaggaagcggagtgaaacagactttgaattttgaccttctcaagttggcgggagacgtggagtccaaccctggacctatgtgtcaccagcagttggtcatctcttggttttccctggtttttctggcatctcccctcgtggccatatgggaactgaagaaagatgtttatgtcgtagaattggattggtatccggatgcccctggagaaatggtggtcctcacctgtgacacccctgaagaagatggtatcacctggaccttggaccagagcagtgaggtcttaggctctggcaaaaccctgaccatccaagtcaaagagtttggagatgctggccagtacacctgtcacaaaggaggcgaggttctaagccattcgctcctgctgcttcacaaaaaggaagatggaatttggtccactgatattttaaaggaccagaaagaacccaaaaataagacctttctaagatgcgaggccaagaattattctggacgtttcacctgctggtggctgacgacaatcagtactgatttgacattcagtgtcaaaagcagcagaggctcttctgacccccaaggggtgacgtgcggagctgctacactctctgcagagagagtcagaggggacaacaaggagtatgagtactcagtggagtgccaggaggacagtgcctgcccagctgctgaggagagtctgcccattgaggtcatggtggatgccgttcacaagctcaagtatgaaaactacaccagcagcttcttcatcagggacatcatcaaacctgacccacccaagaacttgcagctgaagccattaaagaattctcggcaggtggaggtcagctgggagtaccctgacacctggagtactccacattcctacttctccctgacattctgcgttcaggtccagggcaagagcaagagagaaaagaaagatagagtcttcacggacaagacctcagccacggtcatctgccgcaaaaatgccagcattagcgtgcgggcccaggaccgctactatagctcatcttggagcgaatgggcatctgtgccctgcagtggagggggcggcagcgggggaggcggcagcggcggcgggggatcgagaaacctccccgtggccactccagacccaggaatgttcccatgccttcaccactcccaaaacctgctgagggccgtcagcaacatgctccagaaggccagacaaactctagaattttacccttgcacttctgaagagattgatcatgaagatatcacaaaagataaaaccagcacagtggaggcctgtttaccattggaattaaccaagaatgagagttgcctaaattccagagagacctctttcataactaatgggagttgcctggcctccagaaagacctcttttatgatggccctgtgccttagtagtatttatgaagacttgaagatgtaccaggtggagttcaagaccatgaatgcaaagcttctgatggatcctaagaggcagatctttctagatcaaaacatgctggcagttattgatgagctgatgcaggccctgaatttcaacagtgagactgtgccacaaaaatcctcccttgaagaaccggatttttataaaactaaaatcaagctctgcatacttcttcatgctttcagaattcgggcagtgactattgatagagtgatgagctatctgaatgcttcctaagctagcttgactgactgagatacagcgtaccttcagctcacagacatgataagatacattgatgagtttggacaaaccacaactagaatgcagtgaaaaaaatgctttatttgtgaaatttgtgatgctattgctttatttgtaaccattataagctgcaataaacaagttaacaacaacaattgcattcattttatgtttcaggttcagggggaggtgtgggaggttttttaaagcaagtaaaacctctacaaatgtggtagtcgtcagctatcctgcaggaacttgtttatttgaaaatcaattcacaaaatccgagtagttattttgcctcccccttcccatttaacagaatacaccaatctctccccacgcacagctttaaacatttggataccattagatatagacatggttttagattccacattccaaacagtttcagagcgagccaatctggggtcagtgatagataaaaatccatcgggatagtcttttaaagcgctttcacagtccaactgctgcggatgcgactccggagtctggatcacggtcatctggaagaagaacgatgggaatcataatccgaaaacggtatcggacgattgtgtctcatcaaacccacaagcagccgctgtctgcgtcgctccgtgcgactgctgtttatgggatcagggtccacagtgtcctgaagcatgattttaatagcccttaacatcaactttctggtgcgatgcgcgcagcaacgcattctgatttcactcaaatctttgcagtaggtacaacacattattacaatattgtttaataaaccataattaaaagcgctccagccaaaactcatatctgatataatcgcccctgcatgaccatcataccaaagtttaatataaattaaatgacgttccctcaaaaacacactacccacatacatgatctcttttggcatgtgcatattaacaatctgtctgtaccatggacaacgttggttaatcatgcaacccaatataaccttccggaaccacactgccaacaccgctcccccagccatgcattgaagtgaaccctgctgattacaatgacaatgaagaacccaattctctcgaccgtgaatcacttgagaatgaaaaatatctatagtggcacaacatagacataaatgcatgcatcttctcataatttttaactcctcaggatttagaaacatatcccagggaataggaagctcttgcagaacagtaaagctggcagaacaaggaagaccacgaacacaacttacactatgcatagtcatagtatcacaatctggcaacagcgggtggtcttcagtcatagaagctcgggtttcattttcctcacaacgtggtaactgggctctggtgtaagggtgatgtctggcgcatgatgtcgagcgtgcgcgcaaccttgtcataatggagttgcttcctgacattctcgtattttgtatagcaaaacgcggccctggcagaacacactcttcttcgccttctatcctgccgcttagcgtgttccgtgtgatagttcaagtacaaccacactcttaagttggtcaaaagaatgctggcttcagttgtaatcaaaactccatcgcatctaatcgttctgaggaaatcatccaagcaatgcaactggattgtgtttcaagcaggagaggagagggaagagacggaagaaccatgttaatttttattccaaacgatctcgcagtacttcaaattgtagatcgcgcagatggcatctctcgcccccactgtgttggtgaaaaagcacagctagatcaaaagaaatgcgattttcaaggtgctcaacggtggcttccagcaaagcctccacgcgcacatccaagaacaaaagaataccaaaagaaggagcattttctaactcctcaatcatcatattacattcctgcaccattcccagataattttcagctttccagccttgaattattcgtgtcagttcttgtggtaaatccaatccacacattacaaacaggtcccggagggcgccctccaccaccattcttaaacacaccctcataatgacaaaatatcttgctcctgtgtcacctgtagcgaattgagaatggcaacatcaattgacatgcccttggctctaagttcttctttaagttctagttgtaaaaactctctcatattatcaccaaactgcttagccagaagccccccgggaacaagagcaggggacgctacagtgcagtacaagcgcagacctccccaattggctccagcaaaaacaagattggaataagcatattgggaaccgccagtaatatcatcgaagttgctggaaatataatcaggcagagtttcttgtaaaaattgaataaaagaaaaatttgccaaaaaaacattcaaaacctctgggatgcaaatgcaataggttaccgcgctgcgctccaacattgttagttttgaattagtctgcaaaaataaaaaaaaaaacaagcgtcatatcatagtagcctgacgaacagatggataaatcagtctttccatcacaagacaagccacagggtctccagctcgaccctcgtaaaacctgtcatcatgattaaacaacagcaccgaaagttcctcgcggtgaccagcatgaataattcttgatgaagcatacaatccagacatgttagcatcagttaacgagaaaaaacagccaacatagcctttgggtataattatgcttaatcgtaagtatagcaaagccacccctcgcggatacaaagtaaaaggcacaggagaataaaaaatataattatttctctgctgctgttcaggcaacgtcgcccccggtccctctaaatacacatacaaagcctcatcagccatggcttaccagacaaagtacagcgggcacacaaagcacaagctctaaagtgactctccaacctctccacaatatatatatacacaagccctaaactgacgtaatgggagtaaagtgtaaaaaatcccgccaaacccaacacacaccccgaaactgcgtcaccagggaaaagtacagtttcacttccgcaatcccaacaggcgtaacttcctctttctcacggtacgtgatatcccactaacttgcaacgtcattttcccacggtcgcaccgccccttttagccgttaaccccacagccaatcaccacacgatccacactttttaaaatcacctcatttacatattggcaccattccatctataaggtatattatatagataga

SEQ ID NO: 112 - DNA, 36157 bp, Artificial Sequence
  Genome sequence of NG-771 virus
tctatctatataatataccttatagatggaatggtgccaatatgtaaatgaggtgattttaaaaagtgtggatcgtgtggtgattggctgtggggttaacggctaaaaggggcggtgcgaccgtgggaaaatgacgttttgtgggggtggagtttttttgcaagttgtcgcgggaaatgtgacgcataaaaaggcttttttctcacggaactacttagttttcccacggtatttaacaggaaatgaggtagttttgaccggatgcaagtgaaaattgttgattttcgcgcgaaaactgaatgaggaagtgtttttctgaataatgtggtatttatggcagggtggagtatttgttcagggccaggtagactttgacccattacgtggaggtttcgattaccgtgttttttacctgaatttccgcgtaccgtgtcaaagtcttctgtttttacgtaggtgtcagctgatcgctagggtatttatacctcagggtttgtgtcaagaggccactcttgagtgccagcgagaagagttttctcctctgcgccggcagtttaataataaaaaaatgagagatttgcgatttctgcctcaggaaataatctctgctgagactggaaatgaaatattggagcttgtggtgcacgccctgatgggagacgatccggagccacctgtgcagctttttgagcctcctacgcttcaggaactgtatgatttagaggtagagggatcggaggattctaatgaggaagctgtaaatggcttttttaccgattctatgcttttagctgctaatgaagggttagaattagatccgcctttggacacttttgatactccaggggtaattgtggaaagcggtacaggtgtaagaaaattacctgatttgagttccgtggactgtgatttgcactgctatgaagacgggtttcctccgagtgatgaggaggaccatgaaaaggagcagtccatgcagactgcagcgggtgagggagtgaaggctgccaatgttggttttcagttggattgcccggagcttcctggacatggctgtaagtcttgtgaatttcacaggaaaaatactggagtaaaggaactgttatgttcgctttgttatatgagaacgcactgccactttatttacagtaagtgtgtttaagttaaaatttaaaggaatatgctgtttttcacatgtatattgagtgtgagttttgtgcttcttattataggtcctgtgtctgatgctgatgaatcaccatctcctgattctactacctcacctcctgagattcaagcacctgttcctgtggacgtgcgcaagcccattcctgtgaagcttaagcctgggaaacgtccagcagtggaaaaacttgaggacttgttacagggtggggacggacctttggacttgagtacacggaaacgtccaagacaataagtgttccatatccgtgtttacttaaggtgacgtcaatatttgtgtgacagtgcaatgtaataaaaatatgttaactgttcactggtttttattgctttttgggcggggactcaggtatataagtagaagcagacctgtgtggttagctcataggagctggctttcatccatggaggtttgggccattttggaagaccttaggaagactaggcaactgttagagaacgcttcggacggagtctccggtttttggagattctggttcgctagtgaattagctagggtagtttttaggataaaacaggactataaacaagaatttgaaaagttgttggtagattgcccaggactttttgaagctcttaatttgggccatcaggttcactttaaagaaaaagttttatcagttttagacttttcaaccccaggtagaactgctgctgctgtggcttttcttacttttatattagataaatggatcccgcagactcatttcagcaggggatacgttttggatttcatagccacagcattgtggagaacatggaaggttcgcaagatgaggacaatcttaggttactggccagtgcagcctttgggtgtagcgggaatcctgaggcatccaccggtcatgccagcggttctggaggaggaacagcaagaggacaacccgagagccggcctggaccctccagtggaggaggcggagtagctgacttgtctcctgaactgcaacgggtgcttactggatctacgtccactggacgggataggggcgttaagagggagagggcatctagtggtactgatgctagatctgagttggctttaagtttaatgagtcgcagacgtcctgaaaccatttggtggcatgaggttcagaaagagggaagggatgaagtttctgtattgcaggagaaatattcactggaacaggtgaaaacatgttggttggagcctgaggatgattgggaggtggccattaaaaattatgccaagatagctttgaggcctgataaacagtataagattactagacggattaatatccggaatgcttgttacatatctggaaatggggctgaggtggtaatagatactcaagacaaggcagttattagatgctgcatgatggatatgtggcctggggtagtcggtatggaagcagtaacttttgtaaatgttaagtttaggggagatggttataatggaatagtgtttatggccaataccaaacttatattgcatggttgtagcttttttggtttcaacaatacctgtgtagatgcctggggacaggttagtgtacggggatgtagtttctatgcgtgttggattgccacagctggcagaaccaagagtcaattgtctctgaagaaatgcatatttcaaagatgtaacctgggcattctgaatgaaggcgaagcaagggtccgccactgcgcttctacagatactggatgttttattttgattaagggaaatgccagcgtaaagcataacatgatttgcggtgcttccgatgagaggccttatcaaatgctcacttgtgctggtgggcattgtaatatgctggctactgtgcatattgtttcccatcaacgcaaaaaatggcctgtttttgatcacaatgtgatgacgaagtgtaccatgcatgcaggtgggcgtagaggaatgtttatgccttaccagtgtaacatgaatcatgtgaaagtgttgttggaaccagatgccttttccagaatgagcctaacaggaatttttgacatgaacatgcaaatctggaagatcctgaggtatgatgatacgagatcgagggtacgcgcatgcgaatgcggaggcaagcatgccaggttccagccggtgtgtgtagatgtgactgaagatctcagaccggatcatttggttattgcccgcactggagcagagttcggatccagtggagaagaaactgactaaggtgagtattgggaaaactttggggtgggattttcagatggacagattgagtaaaaatttgttttttctgtcttgcagctgtcatgagtggaaacgcttcttttaaggggggagtcttcagcccttatctgacagggcgtctcccatcctgggcaggagttcgtcagaatgttatgggatctactgtggatggaagacccgtccaacccgccaattcttcaacgctgacctatgctactttaagttcttcacctttggacgcagctgcagctgccgccgccgcttctgttgccgctaacactgtgcttggaatgggttactatggaagcatcatggctaattccacttcctctaataacccttctaccctgactcaggacaagttacttgtccttttggcccagctggaggctttgacccaacgtctgggtgaactttctcagcaggtggtcgagttgcgagtacaaactgagtctgctgtcggcacggcaaagtctaaataaaaaaatcccagaatcaatgaataaataaacaagcttgttgttgatttaaaatcaagtgtttttatttcatttttcgcgcacggtatgccctagaccaccgatctctatcattgagaactcggtggattttttccaggatcctatagaggtgggattgaatgtttagatacatgggcattaggccgtctttggggtggagatagctccattgaagggattcatgctccggggtagtgttgtaaatcacccagtcataacaaggtcgcagtgcatggtgttgcacaatatcttttagaagtaggctgattgccacagataagcccttggtgtaggtgtttacaaaccggttgagctgggatgggtgcattcggggtgaaattatgtgcattttggattggatttttaagttggcaatattgccgccaagatcccgtcttgggttcatgttatgaaggaccaccaagacggtgtatccggtacatttaggaaatttatcgtgcagcttggatggaaaagcgtggaaaaatttggagacacccttgtgtcctccaagattttccatgcactcatccatgataatagcaatggggccgtgggcagcggcgcgggcaaacacgttccgtgggtctgacacatcatagttatgttcctgagttaaatcatcataagccattttaatgaatttggggcggagagtaccagattggggtatgaatgttccttcgggccccggagcatagttcccctcacagatttgcatttcccaagctttcagttccgagggtggaatcatgtccacctggggggctatgaaaaacaccgtttctggggcgggggtgattaattgtgatgatagcaaatttctgagcaattgagatttgccacatccggtggggccataaatgattccgattacgggttgcaggtggtagtttagggaacggcaactgccgtcttctcgaagcaagggggccacctcgttcatcatttcccttacatgcatattttcccgcaccaaatccattaggaggcgctctcctcctagtgatagaagttcttgtagtgaggaaaagtttttcagcggtttcagaccgtcagccatgggcattttggagagagtttgctgcaaaagttctagtctgttccacagttcagtgatgtgttctatggcatctcgatccagcagacctcctcgtttcgcgggtttggacggctcctggaatagggtatgagacgatgggcgtccagcgctgccagggttcggtccttccagggtctcagtgttcgagtcagggttgtttccgtcacagtgaaggggtgtgcgcctgcttgggcgcttgccagggtgcgcttcagactcatcctgctggtcgaaaacttctgtcgcttggcgccctgtatgtcggccaagtagcagtttaccatgagttcgtagttgagcgcctcggctgcgtggcctttggcgcggagcttacctttggaagttttcttgcataccgggcagtataggcatttcagcgcatacaacttgggcgcaaggaaaacggattctggggagtatgcatctgcgccgcaggaggcgcaaacagtttcacattccaccagccaggttaaatccggttcattggggtcaaaaacaagttttccgccatattttttgatgcgtttcttacctttggtctccatgagttcgtgtcctcgttgagtgacaaacaggctgtccgtgtccccgtagactgattttacaggcctcttctccagtggagtgcctcggtcttcttcgtacaggaactctgaccactctgatacaaaggcgcgcgtccaggccagcacaaaggaggctatgtgggaggggtagcgatcgttgtcaaccagggggtccaccttttccaaagtatgcaaacacatgtcaccctcttcaacatccaggaatgtgattggcttgtaggtgtatttcacgtgacctggggtccccgctgggggggtataaaagggggcggttctttgctcttcctcactgtcttccggatcgctgtccaggaacgtcagctgttggggtaggtattccctctcgaaggcgggcatgacctctgcactcaggttgtcagtttctaagaacgaggaggatttgatattgacagtgccggttgagatgcctttcatgaggttttcgtccatctggtcagaaaacacaatttttttattgtcaagtttggtggcaaatgatccatacagggcgttggataaaagtttggcaatggatcgcatggtttggttcttttccttgtccgcgcgctctttggcggcgatgttgagttggacatactcgcgtgccaggcacttccattcggggaagatagttgttaattcatctggcacgattctcacttgccaccctcgattatgcaaggtaattaaatccacactggtggccacctcgcctcgaaggggttcattggtccaacagagcctacctcctttcctagaacagaaagggggaagtgggtctagcataagttcatcgggagggtctgcatccatggtaaagattcccggaagtaaatccttatcaaaatagctgatgggagtggggtcatctaaggccatttgccattctcgagctgccagtgcgcgctcatatgggttaaggggactgccccatggcatgggatgggtgagtgcagaggcatacatgccacagatgtcatagacgtagatgggatcctcaaagatgcctatgtaggttggatagcatcgcccccctctgatacttgctcgcacatagtcatatagttcatgtgatggcgctagcagccccggacccaagttggtgcgattgggtttttctgttctgtagacgatctggcgaaagatggcgtgagaattggaagagatggtgggtctttgaaaaatgttgaaatgggcatgaggtagacctacagagtctctgacaaagtgggcataagattcttgaagcttggttaccagttcggcggtgacaagtacgtctagggcgcagtagtcaagtgtttcttgaatgatgtcataacctggttggtttttcttttcccacagttcgcggttgagaaggtattcttcgcgatccttccagtactcttctagcggaaacccgtctttgtctgcacggtaagatcctagcatgtagaactgattaactgccttgtaagggcagcagcccttctctacgggtagagagtatgcttgagcagcttttcgtagcgaagcgtgagtaagggcaaaggtgtctctgaccatgactttgaggaattggtatttgaagtcgatgtcgtcacaggctccctgttcccagagttggaagtctacccgtttcttgtaggcggggttgggcaaagcgaaagtaacatcattgaagagaatcttgccggccctgggcatgaaattgcgagtgatgcgaaaaggctgtggtacttccgctcggttattgataacctgggcagctaggacgatctcgtcgaaaccgttgatgttgtgtcctacgatgtataattctatgaaacgcggcgtgcctctgacgtgaggtagcttactgagctcatcaaaggttaggtctgtggggtcagataaggcgtagtgttcgagagcccattcgtgcaggtgaggattcgctttaaggaaggaggaccagaggtccactgccagtgctgtttgtaactggtcccggtactgacgaaaatgccgtccgactgccattttttctggggtgacgcaatagaaggtttgggggtcctgccgccagcgatcccacttgagttttatggcgaggtcataggcgatgttgacgagccgctggtctccagagagtttcatgaccagcatgaaggggattagctgcttgccaaaggaccccatccaggtgtaggtttccacatcgtaggtgagaaagagcctttctgtgcgaggatgagagccaatcgggaagaactggatctcctgccaccagttggaggaatggctgttgatgtgatggaagtagaactccctgcgacgcgccgagcattcatgcttgtgcttgtacagacggccgcagtagtcgcagcgttgcacgggttgtatctcgtgaatgagttgtacctggcttcccttgacgagaaatttcagtgggaagccgaggcctggcgattgtatctcgtgctttactatgttgtctgcatcggcctgttcatcttctgtctcgatggtggtcatgctgacgagccctcgcgggaggcaagtccagacctcggcgcggcaggggcggagctcgaggacgagagcgcgcaggctggagctgtccagggtcctgagacgctgcggactcaggttagtaggcagtgtcaggagattaacttgcatgatcttttggagggcgtgcgggaggttcagatagtacttgatctcaacgggtccgttggtggagatgtcgatggcttgcagggttccgtgtcccttgggcgctaccaccgtgcccttgtttttcattttggacggcggtggctctgttgcttcttgcatgtttagaagcggtgtcgagggcgcgcaccgggcggcaggggcggctcgggacccggcggcatggctggcagtggtacgtcggcgccgcgcgcgggtaggttctggtactgcgccctgagaagactcgcatgcgcgacgacgcggcggttgacatcctggatctgacgcctctgggtgaaagctaccggccccgtgagcttgaacctgaaagagagttcaacagaatcaatctcggtatcgttgacggcggcttgcctaaggatttcttgcacgtcaccagagttgtcctggtaggcgatctccgccatgaactgctcgatctcttcctcttgaagatctccgcggcccgctctctcgacggtggccgcgaggtcgttggagatgcgcccaatgagttgagagaatgcattcatgcccgcctcgttccagacgcggctgtagaccacggcccccacgggatctctcgcgcgcatgaccacctgggcgaggttgagctccacgtggcgggtgaagaccgcatagttgcataggcgctggaaaaggtagttgagtgtggtggcgatgtgctcggtgacgaagaaatacatgatccatcgtctcagcggcatctcgctgacatcgcccagagcttccaagcgctccatggcctcgtagaagtccacggcaaaattaaaaaactgggagtttcgcgcggacacggtcaactcctcttccagaagacggataagttcggcgatggtggtgcgcacctcgcgctcgaaagcccctgggatttcttcctcaatctcttcttcttccactaacatctcttcctcttcaggtggggctgcaggaggagggggaacgcggcgacgccggcggcgcacgggcagacggtcgatgaatctttcaatgacctctccgcggcggcggcgcatggtttcagtgacggcgcggccgttctcgcgcggtcgcagagtaaaaacaccgccgcgcatctccttaaagtggtgactgggaggttctccgtttgggagggagagggcgctgattatacattttattaattggcccgtagggactgcacgcagagatctgatcgtgtcaagatccacgggatctgaaaacctttcgacgaaagcgtctaaccagtcacagtcacaaggtaggctgagtacggcttcttgtgggcgggggtggttatgtgttcggtctgggtcttctgtttcttcttcatctcgggaaggtgagacgatgctgctggtgatgaaattaaagtaggcagttctaagacggcggatggtggcgaggagcaccaggtctttgggtccggcttgctggatacgcaggcgattggccattccccaagcattatcctgacatctagcaagatctttgtagtagtcttgcatgagccgttctacgggcacttcttcctcacccgttctgccatgcatacgtgtgagtccaaatccgcgcattggttgtaccagtgccaagtcagctacgactctttcggcgaggatggcttgctgtacttgggtaagggtggcttgaaagtcatcaaaatccacaaagcggtggtaagctcctgtattaatggtgtaagcacagttggccatgactgaccagttaactgtctggtgaccagggcgcacgagctcggtgtatttaaggcgcgaataggcgcgggtgtcaaagatgtaatcgttgcaggtgcgcaccagatactggtaccctataagaaaatgcggcggtggttggcggtagagaggccatcgttctgtagctggagcgccaggggcgaggtcttccaacataaggcggtgatagccgtagatgtacctggacatccaggtgattcctgcggcggtagtagaagcccgaggaaactcgcgtacgcggttccaaatgttgcgtagcggcatgaagtagttcattgtaggcacggtttgaccagtgaggcgcgcgcagtcattgatgctctatagacacggagaaaatgaaagcgttcagcgactcgactccgtagcctggaggaacgtgaacgggttgggtcgcggtgtaccccggttcgagacttgtactcgagccggccggagccgcggctaacgtggtattggcactcccgtctcgacccagcctacaaaaatccaggatacggaatcgagtcgttttgctggtttccgaatggcagggaagtgagtcctattttttttttttgccgctcagatgcatcccgtgctgcgacagatgcgcccccaacaacagcccccctcgcagcagcagcagcagcaatcacaaaaggctgtccctgcaactactgcaactgccgccgtgagcggtgcgggacagcccgcctatgatctggacttggaagagggcgaaggactggcacgtctaggtgcgccttcacccgagcggcatccgcgagttcaactgaaaaaagattctcgcgaggcgtatgtgccccaacagaacctatttagagacagaagcggcgaggagccggaggagatgcgagcttcccgctttaacgcgggtcgtgagctgcgtcacggtttggaccgaagacgagtgttgcgggacgaggatttcgaagttgatgaaatgacagggatcagtcctgccagggcacacgtggctgcagccaaccttgtatcggcttacgagcagacagtaaaggaagagcgtaacttccaaaagtcttttaataatcatgtgcgaaccctgattgcccgcgaagaagttacccttggtttgatgcatttgtgggatttgatggaagctatcattcagaaccctactagcaaacctctgaccgcccagctgtttctggtggtgcaacacagcagagacaatgaggctttcagagaggcgctgctgaacatcaccgaacccgaggggagatggttgtatgatcttatcaacattctacagagtatcatagtgcaggagcggagcctgggcctggccgagaaggtggctgccatcaattactcggttttgagcttgggaaaatattacgctcgcaaaatctacaagactccatacgttcccatagacaaggaggtgaagatagatgggttctacatgcgcatgacgctcaaggtcttgaccctgagcgatgatcttggggtgtatcgcaatgacagaatgcatcgcgcggttagcgccagcaggaggcgcgagttaagcgacagggaactgatgcacagtttgcaaagagctctgactggagctggaaccgagggtgagaattacttcgacatgggagctgacttgcagtggcagcctagtcgcagggctctgagcgccgcgacggcaggatgtgagcttccttacatagaagaggcggatgaaggcgaggaggaagagggcgagtacttggaagactgatggcacaacccgtgttttttgctagatggaacagcaagcaccggatcccgcaatgcgggcggcgctgcagagccagccgtccggcattaactcctcggacgattggacccaggccatgcaacgtatcatggcgttgacgactcgcaaccccgaagcctttagacagcaaccccaggccaaccgtctatcggccatcatggaagctgtagtgccttcccgctctaatcccactcatgagaaggtcctggccatcgtgaacgcgttggtggagaacaaagctattcgtccagatgaggccggactggtatacaacgctctcttagaacgcgtggctcgctacaacagtagcaatgtgcaaaccaatttggaccgtatgataacagatgtacgcgaagccgtgtctcagcgcgaaaggttccagcgtgatgccaacctgggttcgctggtggcgttaaatgctttcttgagtactcagcctgctaatgtgccgcgtggtcaacaggattatactaactttttaagtgctttgagactgatggtatcagaagtacctcagagcgaagtgtatcagtccggtcctgattacttctttcagactagcagacagggcttgcagacggtaaatctgagccaagcttttaaaaaccttaaaggtttgtggggagtgcatgccccggtaggagaaagagcaaccgtgtctagcttgttaactccgaactcccgcctattattactgttggtagctcctttcaccgacagcggtagcatcgaccgtaattcctatttgggttacctactaaacctgtatcgcgaagccatagggcaaagtcaggtggacgagcagacctatcaagaaattacccaagtcagtcgcgctttgggacaggaagacactggcagtttggaagccactctgaacttcttgcttaccaatcggtctcaaaagatccctcctcaatatgctcttactgcggaggaggagaggatccttagatatgtgcagcagagcgtgggattgtttctgatgcaagagggggcaactccgactgcagcactggacatgacagcgcgaaatatggagcccagcatgtatgccagtaaccgacctttcattaacaaactgctggactacttgcacagagctgccgctatgaactctgattatttcaccaatgccatcttaaacccgcactggctgcccccacctggtttctacacgggcgaatatgacatgcccgaccctaatgacggatttctgtgggacgacgtggacagcgatgttttttcacctctttctgatcatcgcacgtggaaaaaggaaggcggcgatagaatgcattcttctgcatcgctgtccggggtcatgggtgctaccgcggctgagcccgagtctgcaagtccttttcctagtctacccttttctctacacagtgtacgtagcagcgaagtgggtagaataagtcgcccgagtttaatgggcgaagaggagtatctaaacgattccttgctcagaccggcaagagaaaaaaatttcccaaacaatggaatagaaagtttggtggataaaatgagtagatggaagacttatgctcaggatcacagagacgagcctgggatcatggggattacaagtagagcgagccgtagacgccagcgccatgacagacagaggggtcttgtgtgggacgatgaggattcggccgatgatagcagcgtgctggacttgggtgggagaggaaggggcaacccgtttgctcatttgcgccctcgcttgggtggtatgttgtaaaaaaaaataaaaaaaaaactcaccaaggccatggcgacgagcgtacgttcgttcttctttattatctgtgtctagtataatgaggcgagtcgtgctaggcggagcggtggtgtatccggagggtcctcctccttcgtacgagagcgtgatgcagcagcagcaggcgacggcggtgatgcaatccccactggaggctccctttgtgcctccgcgatacctggcacctacggagggcagaaacagcattcgttattcggaactggcacctcagtacgataccaccaggttgtatctggtggacaacaagtcggcggacattgcttctctgaactatcagaatgaccacagcaacttcttgaccacggtggtgcaaaacaatgactttacccctacggaagccagcacccagaccattaactttgatgaacgatcgcggtggggcggtcagctaaagaccatcatgcatactaacatgccaaacgtgaacgagtatatgtttagtaacaagttcaaagcgcgtgtgatggtgtccagaaaacctcccgacggtgctgcagttggggatacttatgatcacaagcaggatattttgaaatatgagtggttcgagtttactttgccagaaggcaacttttcagttactatgactattgatttgatgaacaatgccatcatagataattacttgaaagtgggtagacagaatggagtgcttgaaagtgacattggtgttaagttcgacaccaggaacttcaagctgggatgggatcccgaaaccaagttgatcatgcctggagtgtatacgtatgaagccttccatcctgacattgtcttactgcctggctgcggagtggattttaccgagagtcgtttgagcaaccttcttggtatcagaaaaaaacagccatttcaagagggttttaagattttgtatgaagatttagaaggtggtaatattccggccctcttggatgtagatgcctatgagaacagtaagaaagaacaaaaagccaaaatagaagctgctacagctgctgcagaagctaaggcaaacatagttgccagcgactctacaagggttgctaacgctggagaggtcagaggagacaattttgcgccaacacctgttccgactgcagaatcattattggccgatgtgtctgaaggaacggacgtgaaactcactattcaacctgtagaaaaagatagtaagaatagaagctataatgtgttggaagacaaaatcaacacagcctatcgcagttggtatctttcgtacaattatggcgatcccgaaaaaggagtgcgttcctggacattgctcaccacctcagatgtcacctgcggagcagagcaggtctactggtcgcttccagacatgatgaaggatcctgtcactttccgctccactagacaagtcagtaactaccctgtggtgggtgcagagcttatgcccgtcttctcaaagagcttctacaacgaacaagctgtgtactcccagcagctccgccagtccacctcgcttacgcacgtcttcaaccgctttcctgagaaccagattttaatccgtccgccggcgcccaccattaccaccgtcagtgaaaacgttcctgctctcacagatcacgggaccctgccgttgcgcagcagtatccggggagtccaacgtgtgaccgttactgacgccagacgccgcacctgtccctacgtgtacaaggcactgggcatagtcgcaccgcgcgtcctttcaagccgcactttctaaaaaaaaaaaaaatgtccattcttatctcgcccagtaataacaccggttggggtctgcgcgctccaagcaagatgtacggaggcgcacgcaaacgttctacccaacatcctgtccgtgttcgcggacattttcgcgctccatggggcgccctcaagggccgcactcgcgttcgaaccaccgtcgatgatgtaatcgatcaggtggttgccgacgcccgtaattatactcctactgcgcctacatctactgtggatgcagttattgacagtgtagtggctgacgctcgcaactatgctcgacgtaagagccggcgaaggcgcattgccagacgccaccgagctaccactgccatgcgagccgcaagagctctgctacgaagagctagacgcgtggggcgaagagccatgcttagggcggccagacgtgcagcttcgggcgccagcgccggcaggtcccgcaggcaagcagccgctgtcgcagcggcgactattgccgacatggcccaatcgcgaagaggcaatgtatactgggtgcgtgacgctgccaccggtcaacgtgtacccgtgcgcacccgtccccctcgcacttagaagatactgagcagtctccgatgttgtgtcccagcggcgaggatgtccaagcgcaaatacaaggaagaaatgctgcaggttatcgcacctgaagtctacggccaaccgttgaaggatgaaaaaaaaccccgcaaaatcaagcgggttaaaaaggacaaaaaagaagaggaagatggcgatgatgggctggcggagtttgtgcgcgagtttgccccacggcgacgcgtgcaatggcgtgggcgcaaagttcgacatgtgttgagacctggaacttcggtggtctttacacccggcgagcgttcaagcgctacttttaagcgttcctatgatgaggtgtacggggatgatgatattcttgagcaggcggctgaccgattaggcgagtttgcttatggcaagcgtagtagaataacttccaaggatgagacagtgtcgatacccttggatcatggaaatcccacccctagtcttaaaccggtcactttgcagcaagtgttacccgtaactccgcgaacaggtgttaaacgcgaaggtgaagatttgtatcccactatgcaactgatggtacccaaacgccagaagttggaggacgttttggagaaagtaaaagtggatccagatattcaacctgaggttaaagtgagacccattaagcaggtagcgcctggtctgggggtacaaactgtagacattaagattcccactgaaagtatggaagtgcaaactgaacccgcaaagcctactgccacctccactgaagtgcaaacggatccatggatgcccatgcctattacaactgacgccgccggtcccactcgaagatcccgacgaaagtacggtccagcaagtctgttgatgcccaattatgttgtacacccatctattattcctactcctggttaccgaggcactcgctactatcgcagccgaaacagtacctcccgccgtcgccgcaagacacctgcaaatcgcagtcgtcgccgtagacgcacaagcaaaccgactcccggcgccctggtgcggcaagtgtaccgcaatggtagtgcggaacctttgacactgccgcgtgcgcgttaccatccgagtatcatcacttaatcaatgttgccgctgcctccttgcagatatggccctcacttgtcgccttcgcgttcccatcactggttaccgaggaagaaactcgcgccgtagaagagggatgttgggacgcggaatgcgacgctacaggcgacggcgtgctatccgcaagcaattgcggggtggttttttaccagccttaattccaattatcgctgctgcaattggcgcgataccaggcatagcttccgtggcggttcaggcctcgcaacgacattgacattggaaaaaaacgtataaataaaaaaaaaaaaatacaatggactctgacactcctggtcctgtgactatgttttcttagagatggaagacatcaatttttcatccttggctccgcgacacggcacgaagccgtacatgggcacctggagcgacatcggcacgagccaactgaacgggggcgccttcaattggagcagtatctggagcgggcttaaaaattttggctcaaccataaaaacatacgggaacaaagcttggaacagcagtacaggacaggcgcttagaaataaacttaaagaccagaacttccaacaaaaagtagtcgatgggatagcttccggcatcaatggagtggtagatttggctaaccaggctgtgcagaaaaagataaacagtcgtttggacccgccgccagcaaccccaggtgaaatgcaagtggaggaagaaattcctccgccagaaaaacgaggcgacaagcgtccgcgtcccgatttggaagagacgctggtgacgcgcgtagatgaaccgccttcttatgaggaagcaacgaagcttggaatgcccaccactagaccgatagccccaatggccaccggggtgatgaaaccttctcagttgcatcgacccgtcaccttggatttgccccctccccctgctgctactgctgtacccgcttctaagcctgtcgctgccccgaaaccagtcgccgtagccaggtcacgtcccgggggcgctcctcgtccaaatgcgcactggcaaaatactctgaacagcatcgtgggtctaggcgtgcaaagtgtaaaacgccgtcgctgcttttaattaaatatggagtagcgcttaacttgcctatctgtgtatatgtgtcattacacgccgtcacagcagcagaggaaaaaaggaagaggtcgtgcgtcgacgctgagttactttcaagatggccaccccatcgatgctgccccaatgggcatacatgcacatcgccggacaggatgcttcggagtacctgagtccgggtctggtgcagttcgcccgcgccacagacacctacttcaatctgggaaataagtttagaaatcccaccgtagcgccgacccacgatgtgaccaccgaccgtagccagcggctcatgttgcgcttcgtgcccgttgaccgggaggacaatacatactcttacaaagtgcggtacaccctggccgtgggcgacaacagagtgctggatatggccagcacgttctttgacattaggggtgtgttggacagaggtcccagtttcaaaccctattctggtacggcttacaactccctggctcctaaaggcgctccaaatacatctcagtggattgcagaaggtgtaaaaaatacaactggtgaggaacacgtaacagaagaggaaaccaatactactacttacacttttggcaatgctcctgtaaaagctgaagctgaaattacaaaagaaggactcccagtaggtttggaagtttcagatgaagaaagtaaaccgatttatgctgataaaacatatcagccagaacctcagctgggagatgaaacttggactgaccttgatggaaaaaccgaaaagtatggaggcagggctctcaaacccgatactaagatgaaaccatgctacgggtcctttgccaaacctactaatgtgaaaggcggtcaggcaaaacaaaaaacaacggagcagccaaatcagaaagtcgaatatgatatcgacatggagttttttgatgcggcatcgcagaaaacaaacttaagtcctaaaattgtcatgtatgcagaaaatgtaaatttggaaactccagacactcatgtagtgtacaaacctggaacagaagacacaagttccgaagctaatttgggacaacaatctatgcccaacagacccaactacattggcttcagagataactttattggacttatgtactataacagtactggtaacatgggggtgctggctggtcaagcgtctcagttaaatgcagtggttgacttgcaggacagaaacacagaactttcttaccaactcttgcttgactctctgggcgacagaaccagatactttagcatgtggaatcaggctgtggacagttatgatcctgatgtacgtgttattgaaaatcatggtgtggaagatgaacttcccaactactgttttccactggacggcataggtgttccaacaaccagttacaaatcaatagttccaaatggagacaatgcgcctaattggaaggaacctgaagtaaatggaacaagtgagatcggacagggtaatttgtttgccatggaaattaaccttcaagccaatctatggcgaagtttcctttattccaatgtggctctatatctcccagactcgtacaaatacaccccgtccaatgtcactcttccagaaaacaaaaacacctacgactacatgaacgggcgggtggtgccgccatctctagtagacacctatgtgaacattggtgccaggtggtctctggatgccatggacaatgtcaacccattcaaccaccaccgtaacgctggcttgcgttaccgatccatgcttctgggtaacggacgttatgtgcctttccacatacaagtgcctcaaaaattcttcgctgttaaaaacctgctgcttctcccaggctcctacacttatgagtggaactttaggaaggatgtgaacatggttctacagagttccctcggtaacgacctgcgggtagatggcgccagcatcagtttcacgagcatcaacctctatgctacttttttccccatggctcacaacaccgcttccacccttgaagccatgctgcggaatgacaccaatgatcagtcattcaacgactacctatctgcagctaacatgctctaccccattcctgccaatgcaaccaatattcccatttccattccttctcgcaactgggcggctttcagaggctggtcatttaccagactgaaaaccaaagaaactccctctttggggtctggatttgacccctactttgtctattctggttctattccctacctggatggtaccttctacctgaaccacacttttaagaaggtttccatcatgtttgactcttcagtgagctggcctggaaatgacaggttactatctcctaacgaatttgaaataaagcgcactgtggatggcgaaggctacaacgtagcccaatgcaacatgaccaaagactggttcttggtacagatgctcgccaactacaacatcggctatcagggcttctacattccagaaggatacaaagatcgcatgtattcatttttcagaaacttccagcccatgagcaggcaggtggttgatgaggtcaattacaaagacttcaaggccgtcgccataccctaccaacacaacaactctggctttgtgggttacatggctccgaccatgcgccaaggtcaaccctatcccgctaactatccctatccactcattggaacaactgccgtaaatagtgttacgcagaaaaagttcttgtgtgacagaaccatgtggcgcataccgttctcgagcaacttcatgtctatgggggcccttacagacttgggacagaatatgctctatgccaactcagctcatgctctggacatgacctttgaggtggatcccatggatgagcccaccctgctttatcttctcttcgaagttttcgacgtggtcagagtgcatcagccacaccgcggcatcatcgaggcagtctacctgcgtacaccgttctcggccggtaacgctaccacgtaagaagcttcttgcttcttgcaaatagcagctgcaaccatggcctgcggatcccaaaacggctccagcgagcaagagctcagagccattgtccaagacctgggttgcggaccctattttttgggaacctacgataagcgcttcccggggttcatggcccccgataagctcgcctgtgccattgtaaatacggccggacgtgagacggggggagagcactggttggctttcggttggaacccacgttctaacacctgctacctttttgatccttttggattctcggatgatcgtctcaaacagatttaccagtttgaatatgagggtctcctgcgccgcagcgctcttgctaccaaggaccgctgtattacgctggaaaaatctacccagaccgtgcagggtccccgttctgccgcctgcggacttttctgctgcatgttccttcacgcctttgtgcactggcctgaccgtcccatggacggaaaccccaccatgaaattgctaactggagtgccaaacaacatgcttcattctcctaaagtccagcccaccctgtgtgacaatcaaaaagcactctaccattttcttaatacccattcgccttattttcgctcccatcgtacacacatcgaaagggccactgcgttcgaccgtatggatgttcaataatgactcatgtaaacaacgtgttcaataaacatcactttatttttttacatgtatcaaggctctgcattacttatttatttacaagtcgaatgggttctgacgagaatcagaatgacccgcaggcagtgatacgttgcggaactgatacttgggttgccacttgaattcgggaatcaccaacttgggaaccggtatatcgggcaggatgtcactccacagctttctggtcagctgcaaagctccaagcaggtcaggagccgaaatcttgaaatcacaattaggaccagtgctttgagcgcgagagttgcggtacaccggattgcagcactgaaacaccatcagcgacggatgtctcacgcttgccagcacggtgggatctgcaatcatgcccacatccagatcttcagcattggcaatgctgaacggggtcatcttgcaggtctgcctacccatggcgggcacccaattaggcttgtggttgcaatcgcagtgcagggggatcagtatcatcttggcctgatcctgtctgattcctggatacacggctctcatgaaagcatcatattgcttgaaagcctgctgggctttactaccctcggtataaaacatcccgcaggacctgctcgaaaactggttagctgcacagccggcatcattcacacagcagcgggcgtcattgttagctatttgcaccacacttctgccccagcggttttgggtgattttggttcgctcgggattctcctttaaggctcgttgtccgttctcgctggccacatccatctcgataatctgctccttctgaatcataatattgccatgcaggcacttcagcttgccctcataatcattgcagccatgaggccacaacgcacagcctgtacattcccaattatggtgggcgatctgagaaaaagaatgtatcattccctgcagaaatcttcccatcatcgtgctcagtgtcttgtgactagtgaaagttaactggatgcctcggtgctcctcgtttacgtactggtgacagatgcgcttgtattgttcgtgttgctcaggcattagtttaaaagaggttctaagttcgttatccagcctgtacttctccatcagcagacacatcacttccatgcctttctcccaagcagacaccaggggcaagctaatcggattcttaacagtgcaggcagcagctcctttagccagagggtcatctttagcgatcttctcaatgcttcttttgccatccttctcaacgatgcgcacgggcgggtagctgaaacccactgctacaagttgcgcctcttctctttcttcttcgctgtcttgactgatgtcttgcatggggatatgtttggtcttccttggcttctttttggggggtatcggaggaggaggactgtcgctccgttccggagacagggaggattgtgacgtttcgctcaccattaccaactgactgtcggtagaagaacctgaccccacacggcgacaggtgtttctcttcgggggcagaggtggaggcgattgcgaagggctgcggtccgacctggaaggcggatgactggcagaaccccttccgcgttcgggggtgtgctccctgtggcggtcgcttaactgatttccttcgcggctggccattgtgttctcctaggcagagaaacaacagacatggaaactcagccattgctgtcaacatcgccacgagtgccatcacatctcgtcctcagcgacgaggaaaaggagcagagcttaagcattccaccgcccagtcctgccaccacctctaccctagaagataaggaggtcgacgcatctcatgacatgcagaataaaaaagcgaaagagtctgagacagacatcgagcaagacccgggctatgtgacaccggtggaacacgaggaagagttgaaacgctttctagagagagaggatgaaaactgcccaaaacaacgagcagataactatcaccaagatgctggaaatagggatcagaacaccgactacctcatagggcttgacggggaagacgcgctccttaaacatctagcaagacagtcgctcatagtcaaggatgcattattggacagaactgaagtgcccatcagtgtggaagagctcagccgcgcctacgagcttaacctcttttcacctcgtactccccccaaacgtcagccaaacggcacctgcgagccaaatcctcgcttaaacttttatccagcttttgctgtgccagaagtactggctacctatcacatcttttttaaaaatcaaaaaattccagtctcctgccgcgctaatcgcacccgcgccgatgccctactcaatctgggacctggttcacgcttacctgatatagcttccttggaagaggttccaaagatcttcgagggtctgggcaataatgagactcgggccgcaaatgctctgcaaaagggagaaaatggcatggatgagcatcacagcgttctggtggaattggaaggcgataatgccagactcgcagtactcaagcgaagcatcgaggtcacacacttcgcatatcccgctgtcaacctgccccctaaagtcatgacggcggtcatggaccagttactcattaagcgcgcaagtcccctttcagaagacatgcatgacccagatgcctgtgatgagggtaaaccagtggtcagtgatgagcagctaacccgatggctgggcaccgactctcccagggatttggaagagcgtcgcaagcttatgatggccgtggtgctggttaccgtagaactagagtgtctccgacgtttctttaccgattcagaaaccttgcgcaaactcgaagagaatctgcactacacttttagacacggctttgtgcggcaggcatgcaagatatctaacgtggaactcaccaacctggtttcctacatgggtattctgcatgagaatcgcctaggacaaagcgtgctgcacagcaccctgaagggggaagcccgccgtgattacatccgcgattgtgtctatctgtacctgtgccacacgtggcaaaccggcatgggtgtatggcagcaatgtttagaagaacagaacttgaaagagcttgacaagctcttacagaaatctcttaaggttctgtggacagggttcgacgagcgcaccgtcgcttccgacctggcagacctcatcttcccagagcgtctcagggttactttgcgaaacggattgcctgactttatgagccagagcatgcttaacaattttcgctctttcatcctggaacgctccggtatcctgcccgccacctgctgcgcactgccctccgactttgtgcctctcacctaccgcgagtgccccccgccgctatggagtcactgctacctgttccgtctggccaactatctctcctaccactcggatgtgatcgaggatgtgagcggagacggcttgctggagtgtcactgccgctgcaatctgtgcacgccccaccggtccctagcttgcaacccccagttgatgagcgaaacccagataataggcacctttgaattgcaaggccccagcagccaaggcgatgggtcttctcctgggcaaagtttaaaactgaccccgggactgtggacctccgcctacttgcgcaagtttgctccggaagattaccacccctatgaaatcaagttctatgaggaccaatcacagcctccaaaggccgaactttcggcctgcgtcatcacccagggggcaattctggcccaattgcaagccatccaaaaatcccgccaagaatttctactgaaaaagggtaagggggtctaccttgacccccagaccggcgaggaactcaacacaaggttccctcaggatgtcccaacgacgagaaaacaagaagttgaaggtgcagccgccgcccccagaagatatggaggaagattgggacagtcaggcagaggaggcggaggaggacagtctggaggacagtctggaggaagacagtttggaggaggaaaacgaggaggcagaggaggtggaagaagtaaccgccgacaaacagttatcctcggctgcggagacaagcaacagcgctaccatctccgctccgagtcgaggaacccggcggcgtcccagcagtagatgggacgagaccggacgcttcccgaacccaaccagcgcttccaagaccggtaagaaggatcggcagggatacaagtcctggcgggggcataagaatgccatcatctcctgcttgcatgagtgcgggggcaacatatccttcacgcggcgctacttgctattccaccatggggtgaactttccgcgcaatgttttgcattactaccgtcacctccacagcccctactatagccagcaaatcccggcagtctcgacagataaagacagcggcggcgacctccaacagaaaaccagcagcggcagttagaaaatacacaacaagtgcagcaacaggaggattaaagattacagccaacgagccagcgcaaacccgagagttaagaaatcggatctttccaaccctgtatgccatcttccagcagagtcggggtcaagagcaggaactgaaaataaaaaaccgatctctgcgttcgctcaccagaagttgtttgtatcacaagagcgaagatcaacttcagcgcactctcgaggacgccgaggctctcttcaacaagtactgcgcgctgactcttaaagagtaggcagcgaccgcgcttattcaaaaaaggcgggaattacatcatcctcgacatgagtaaagaaattcccacgccttacatgtggagttatcaaccccaaatgggattggcggcaggcgcctcccaggactactccacccgcatgaattggctcagcgccgggccttctatgatttctcgagttaatgatatacgcgcctaccgaaaccaaatacttttggaacagtcagctcttaccaccacgccccgccaacaccttaatcccagaaattggcccgccgccctagtgtaccaggaaagtcccgctcccaccactgtattacttcctcgagacgcccaggccgaagtccaaatgactaatgcaggtgcgcagttagctggcggctccaccctatgtcgtcacaggcctcggcataatataaaacgcctgatgatcagaggccgaggtatccagctcaacgacgagtcggtgagctctccgcttggtctacgaccagacggaatctttcagattgccggctgcgggagatcttccttcacccctcgtcaggctgttctgactttggaaagttcgtcttcgcaaccccgctcgggcggaatcgggaccgttcaatttgtggaggagtttactccctctgtctacttcaaccccttctccggatctcctgggcattacccggacgagttcataccgaacttcgacgcgattagcgagtcagtggacggctacgattgatgtctggtgacgcggctgagctatctcggctgcgacatctagaccactgccgccgctttcgctgctttgcccgggaactcattgagttcatctacttcgaactccccaaggatcaccctcaaggtccggcccacggagtgcggatttctatcgaaggcaaaatagactctcgcctgcaacgaattttctcccagcggcccgtgctgatcgagcgagaccagggaaacaccacggtttccatctactgcatttgtaatcaccccggattgcatgaaagcctttgctgtcttatgtgtactgagtttaataaaaactgaattaagactctcctacggactgccgcttcttcaacccggattttacaaccagaagaacgaaacttttcctgtcgtccaggactctgttaacttcacctttcctactcacaaactagaagctcaacgactacaccgcttttccagaagcattttccctactaatactactttcaaaaccggaggtgagctccaaggtcttcctacagaaaacccttgggtggaagcgggccttgtagtgctaggaattcttgcgggtgggcttgtgattattctttgctacctatacacaccttgcttcactttcttagtggtgttgtggtattggtttaaaaaatggggcccatactagtcttgcttgttttactttcgcttttggaaccgggttctgccaattacgatccatgtctagacttcgacccagaaaactgcacacttacttttgcacccgacacaagccgcatctgtggagttcatcgcctctcttacgaacttggcccccaacgacaaaaatttacctgcatggtgggaatcaaccccatagttatcacccagcaaagtggagatactaagggttgcattcactgctcctgcgattccatcgagtgcacctacaccctgctgaagaccctatgcggcctaagagacctgctaccaatgaattaaaaaatgattaataaaaaatcacttacttgaaatcagcaataaggtctctgttgaaattttctcccagcagcacctcacttccctcttcccaactctggtattctaaaccccgttcagcggcatactttctccatactttaaaggggatgtcaaattttagctcctctcctgtacccacaatcttcatgtctttcttcccagatgaccaagagagtccggctcagtgactccttcaaccctgtctacccctatgaagatgaaagcacctcccaacacccctttataaacccagggtttatttccccaaatggcttcacacaaagcccaaacggagttcttactttaaaatgtttaaccccactaacaaccacaggcggatctctacagctaaaagtgggagggggacttacagtggatgacaccaacggttttttgaaagaaaacataagtgccaccacaccactcgttaagactggtcactctataggtttaccactaggagccggattgggaacgaatgaaaataaactttgtatcaaattaggacaaggacttacattcaattcaaacaacatttgcattgatgacaatattaacaccttatggacaggagtcaaccccaccgaagccaactgtcaaatcatgaactccagtgaatctaatgattgcaaattaattctaacactagttaaaactggagcactagtcactgcatttgtttatgttataggagtatctaacaattttaatatgctaactacacacagaaatataaattttactgcagagctgtttttcgattctactggtaatttactaactagactctcatccctcaaaactccacttaatcataaatcaggacaaaacatggctactggtgccattactaatgctaaaggtttcatgcccagcacgactgcctatcctttcaatgataattctagagaaaaagaaaactacatttacggaacttgttactacacagctagtgatcgcactgcttttcccattgacatatctgtcatgcttaaccgaagagcaataaatgacgagacatcatattgtattcgtataacttggtcctggaacacaggagatgccccagaggtgcaaacctctgctacaaccctagtcacctccccatttaccttttactacatcagagaagacgactgacaaataaagtttgcgatcgccaggcccaccatggcccaatctctcgcacttagtctgctcattctcgtgcttgctttcgggattccaagaactcagggaagcgacggcggtgcccaagattgctgtctgaaatatagtcagagaaaaatccctgctaaagtggttcggagttatcgcaaacaagagcccagtttggggtgttcaattcccgcaattctctttttaccacggaaacggtcccaagctgaactgtgcgctgatcctaaagaactgtgggtccaacagctcatgcaacaccttgataaaaccccttctccccaaaagcctgctcaagggggaagcggagagggcagaggaagtctgctaacatgcggtgacgtcgaggagaatcctggacctgactggacctggcgcatcctgttcttggtggcagctgctacgggagctcattccaactgggtgaatgtaataagtgatttgaaaaaaattgaagatcttattcaatctatgcatattgatgctactttatatacggaaagtgatgttcaccccagttgcaaagtaacagcaatgaagtgctttctcttggagttacaagttatttcacttgagtccggagatgcaagtattcatgatacagtagaaaatctgatcatcctagcaaacaacagtttgtcttctaatgggaatgtaacagaatctggatgcaaagaatgtgaggaactggaggaaaaaaatattaaagaatttttgcagagttttgtacatattgtccaaatgttcatcaacacttctggaagcggagctactaacttcagcctgctgaagcaggctggagacgtggaggagaaccctggacctgccttgacctttgctttactggtggccctcctggtgctcagctgcaagtcaagctgctctgtgggctgtgatctgcctcaaacccacagcctgggtagcaggaggaccttgatgctcctggcacagatgaggagaatctctcttttctcctgcttgaaggacagacatgactttggatttccccaggaggagtttggcaaccagttccaaaaggctgaaaccatccctgtcctccatgagatgatccagcagatcttcaatctcttcagcacaaaggactcatctgctgcttgggatgagaccctcctagacaaattctacactgaactctaccagcagctgaatgacctggaagcctgtgtgatacagggggtgggggtgacagagactcccctgatgaaggaggactccattctggctgtgaggaaatacttccaaagaatcactctctatctgaaagagaagaaatacagcccttgtgcctgggaggttgtcagagcagaaatcatgagatctttttctttgtcaacaaacttgcaagaaagtttaagaagtaaggaaggaagcggacagtgtactaattatgctctcttgaaattggctggagatgttgagagcaaccctggacctaagaaaagtggtgttcttttcctcttgggcatcatcttgctggttctgattggagtgcaaggaaccccagtagtgagaaagggtcgctgttcctgcatcagcaccaaccaagggactatccacctacaatccttgaaagaccttaaacaatttgccccaagcccttcctgcgagaaaattgaaatcattgctacactgaagaatggagttcaaacatgtctaaacccagattcagcagatgtgaaggaactgattaaaaagtgggagaaacaggtcagccaaaagaaaaagcaaaagaatgggaaaaaacatcaaaaaaagaaagttctgaaagttcgaaaatctcaacgttctcgtcaaaagaagactacaggaagcggagtgaaacagactttgaattttgaccttctcaagttggcgggagacgtggagtccaaccctggacctatgtgtcaccagcagttggtcatctcttggttttccctggtttttctggcatctcccctcgtggccatatgggaactgaagaaagatgtttatgtcgtagaattggattggtatccggatgcccctggagaaatggtggtcctcacctgtgacacccctgaagaagatggtatcacctggaccttggaccagagcagtgaggtcttaggctctggcaaaaccctgaccatccaagtcaaagagtttggagatgctggccagtacacctgtcacaaaggaggcgaggttctaagccattcgctcctgctgcttcacaaaaaggaagatggaatttggtccactgatattttaaaggaccagaaagaacccaaaaataagacctttctaagatgcgaggccaagaattattctggacgtttcacctgctggtggctgacgacaatcagtactgatttgacattcagtgtcaaaagcagcagaggctcttctgacccccaaggggtgacgtgcggagctgctacactctctgcagagagagtcagaggggacaacaaggagtatgagtactcagtggagtgccaggaggacagtgcctgcccagctgctgaggagagtctgcccattgaggtcatggtggatgccgttcacaagctcaagtatgaaaactacaccagcagcttcttcatcagggacatcatcaaacctgacccacccaagaacttgcagctgaagccattaaagaattctcggcaggtggaggtcagctgggagtaccctgacacctggagtactccacattcctacttctccctgacattctgcgttcaggtccagggcaagagcaagagagaaaagaaagatagagtcttcacggacaagacctcagccacggtcatctgccgcaaaaatgccagcattagcgtgcgggcccaggaccgctactatagctcatcttggagcgaatgggcatctgtgccctgcagtggagggggcggcagcgggggaggcggcagcggcggcgggggatcgagaaacctccccgtggccactccagacccaggaatgttcccatgccttcaccactcccaaaacctgctgagggccgtcagcaacatgctccagaaggccagacaaactctagaattttacccttgcacttctgaagagattgatcatgaagatatcacaaaagataaaaccagcacagtggaggcctgtttaccattggaattaaccaagaatgagagttgcctaaattccagagagacctctttcataactaatgggagttgcctggcctccagaaagacctcttttatgatggccctgtgccttagtagtatttatgaagacttgaagatgtaccaggtggagttcaagaccatgaatgcaaagcttctgatggatcctaagaggcagatctttctagatcaaaacatgctggcagttattgatgagctgatgcaggccctgaatttcaacagtgagactgtgccacaaaaatcctcccttgaagaaccggatttttataaaactaaaatcaagctctgcatacttcttcatgctttcagaattcgggcagtgactattgatagagtgatgagctatctgaatgcttcctaagctagcttgactgactgagatacagcgtaccttcagctcacagacatgataagatacattgatgagtttggacaaaccacaactagaatgcagtgaaaaaaatgctttatttgtgaaatttgtgatgctattgctttatttgtaaccattataagctgcaataaacaagttaacaacaacaattgcattcattttatgtttcaggttcagggggaggtgtgggaggttttttaaagcaagtaaaacctctacaaatgtggtagtcgtcagctatcctgcaggaacttgtttatttgaaaatcaattcacaaaatccgagtagttattttgcctcccccttcccatttaacagaatacaccaatctctccccacgcacagctttaaacatttggataccattagatatagacatggttttagattccacattccaaacagtttcagagcgagccaatctggggtcagtgatagataaaaatccatcgggatagtcttttaaagcgctttcacagtccaactgctgcggatgcgactccggagtctggatcacggtcatctggaagaagaacgatgggaatcataatccgaaaacggtatcggacgattgtgtctcatcaaacccacaagcagccgctgtctgcgtcgctccgtgcgactgctgtttatgggatcagggtccacagtgtcctgaagcatgattttaatagcccttaacatcaactttctggtgcgatgcgcgcagcaacgcattctgatttcactcaaatctttgcagtaggtacaacacattattacaatattgtttaataaaccataattaaaagcgctccagccaaaactcatatctgatataatcgcccctgcatgaccatcataccaaagtttaatataaattaaatgacgttccctcaaaaacacactacccacatacatgatctcttttggcatgtgcatattaacaatctgtctgtaccatggacaacgttggttaatcatgcaacccaatataaccttccggaaccacactgccaacaccgctcccccagccatgcattgaagtgaaccctgctgattacaatgacaatgaagaacccaattctctcgaccgtgaatcacttgagaatgaaaaatatctatagtggcacaacatagacataaatgcatgcatcttctcataatttttaactcctcaggatttagaaacatatcccagggaataggaagctcttgcagaacagtaaagctggcagaacaaggaagaccacgaacacaacttacactatgcatagtcatagtatcacaatctggcaacagcgggtggtcttcagtcatagaagctcgggtttcattttcctcacaacgtggtaactgggctctggtgtaagggtgatgtctggcgcatgatgtcgagcgtgcgcgcaaccttgtcataatggagttgcttcctgacattctcgtattttgtatagcaaaacgcggccctggcagaacacactcttcttcgccttctatcctgccgcttagcgtgttccgtgtgatagttcaagtacaaccacactcttaagttggtcaaaagaatgctggcttcagttgtaatcaaaactccatcgcatctaatcgttctgaggaaatcatccaagcaatgcaactggattgtgtttcaagcaggagaggagagggaagagacggaagaaccatgttaatttttattccaaacgatctcgcagtacttcaaattgtagatcgcgcagatggcatctctcgcccccactgtgttggtgaaaaagcacagctagatcaaaagaaatgcgattttcaaggtgctcaacggtggcttccagcaaagcctccacgcgcacatccaagaacaaaagaataccaaaagaaggagcattttctaactcctcaatcatcatattacattcctgcaccattcccagataattttcagctttccagccttgaattattcgtgtcagttcttgtggtaaatccaatccacacattacaaacaggtcccggagggcgccctccaccaccattcttaaacacaccctcataatgacaaaatatcttgctcctgtgtcacctgtagcgaattgagaatggcaacatcaattgacatgcccttggctctaagttcttctttaagttctagttgtaaaaactctctcatattatcaccaaactgcttagccagaagccccccgggaacaagagcaggggacgctacagtgcagtacaagcgcagacctccccaattggctccagcaaaaacaagattggaataagcatattgggaaccgccagtaatatcatcgaagttgctggaaatataatcaggcagagtttcttgtaaaaattgaataaaagaaaaatttgccaaaaaaacattcaaaacctctgggatgcaaatgcaataggttaccgcgctgcgctccaacattgttagttttgaattagtctgcaaaaataaaaaaaaaaacaagcgtcatatcatagtagcctgacgaacagatggataaatcagtctttccatcacaagacaagccacagggtctccagctcgaccctcgtaaaacctgtcatcatgattaaacaacagcaccgaaagttcctcgcggtgaccagcatgaataattcttgatgaagcatacaatccagacatgttagcatcagttaacgagaaaaaacagccaacatagcctttgggtataattatgcttaatcgtaagtatagcaaagccacccctcgcggatacaaagtaaaaggcacaggagaataaaaaatataattatttctctgctgctgttcaggcaacgtcgcccccggtccctctaaatacacatacaaagcctcatcagccatggcttaccagacaaagtacagcgggcacacaaagcacaagctctaaagtgactctccaacctctccacaatatatatatacacaagccctaaactgacgtaatgggagtaaagtgtaaaaaatcccgccaaacccaacacacaccccgaaactgcgtcaccagggaaaagtacagtttcacttccgcaatcccaacaggcgtaacttcctctttctcacggtacgtgatatcccactaacttgcaacgtcattttcccacggtcgcaccgccccttttagccgttaaccccacagccaatcaccacacgatccacactttttaaaatcacctcatttacatattggcaccattccatctataaggtatattatatagataga

SEQ ID NO: 113 - DNA, 36157 bp, Artificial Sequence
  Genome sequence of NG-772 virus
tctatctatataatataccttatagatggaatggtgccaatatgtaaatgaggtgattttaaaaagtgtggatcgtgtggtgattggctgtggggttaacggctaaaaggggcggtgcgaccgtgggaaaatgacgttttgtgggggtggagtttttttgcaagttgtcgcgggaaatgtgacgcataaaaaggcttttttctcacggaactacttagttttcccacggtatttaacaggaaatgaggtagttttgaccggatgcaagtgaaaattgttgattttcgcgcgaaaactgaatgaggaagtgtttttctgaataatgtggtatttatggcagggtggagtatttgttcagggccaggtagactttgacccattacgtggaggtttcgattaccgtgttttttacctgaatttccgcgtaccgtgtcaaagtcttctgtttttacgtaggtgtcagctgatcgctagggtatttatacctcagggtttgtgtcaagaggccactcttgagtgccagcgagaagagttttctcctctgcgccggcagtttaataataaaaaaatgagagatttgcgatttctgcctcaggaaataatctctgctgagactggaaatgaaatattggagcttgtggtgcacgccctgatgggagacgatccggagccacctgtgcagctttttgagcctcctacgcttcaggaactgtatgatttagaggtagagggatcggaggattctaatgaggaagctgtaaatggcttttttaccgattctatgcttttagctgctaatgaagggttagaattagatccgcctttggacacttttgatactccaggggtaattgtggaaagcggtacaggtgtaagaaaattacctgatttgagttccgtggactgtgatttgcactgctatgaagacgggtttcctccgagtgatgaggaggaccatgaaaaggagcagtccatgcagactgcagcgggtgagggagtgaaggctgccaatgttggttttcagttggattgcccggagcttcctggacatggctgtaagtcttgtgaatttcacaggaaaaatactggagtaaaggaactgttatgttcgctttgttatatgagaacgcactgccactttatttacagtaagtgtgtttaagttaaaatttaaaggaatatgctgtttttcacatgtatattgagtgtgagttttgtgcttcttattataggtcctgtgtctgatgctgatgaatcaccatctcctgattctactacctcacctcctgagattcaagcacctgttcctgtggacgtgcgcaagcccattcctgtgaagcttaagcctgggaaacgtccagcagtggaaaaacttgaggacttgttacagggtggggacggacctttggacttgagtacacggaaacgtccaagacaataagtgttccatatccgtgtttacttaaggtgacgtcaatatttgtgtgacagtgcaatgtaataaaaatatgttaactgttcactggtttttattgctttttgggcggggactcaggtatataagtagaagcagacctgtgtggttagctcataggagctggctttcatccatggaggtttgggccattttggaagaccttaggaagactaggcaactgttagagaacgcttcggacggagtctccggtttttggagattctggttcgctagtgaattagctagggtagtttttaggataaaacaggactataaacaagaatttgaaaagttgttggtagattgcccaggactttttgaagctcttaatttgggccatcaggttcactttaaagaaaaagttttatcagttttagacttttcaaccccaggtagaactgctgctgctgtggcttttcttacttttatattagataaatggatcccgcagactcatttcagcaggggatacgttttggatttcatagccacagcattgtggagaacatggaaggttcgcaagatgaggacaatcttaggttactggccagtgcagcctttgggtgtagcgggaatcctgaggcatccaccggtcatgccagcggttctggaggaggaacagcaagaggacaacccgagagccggcctggaccctccagtggaggaggcggagtagctgacttgtctcctgaactgcaacgggtgcttactggatctacgtccactggacgggataggggcgttaagagggagagggcatctagtggtactgatgctagatctgagttggctttaagtttaatgagtcgcagacgtcctgaaaccatttggtggcatgaggttcagaaagagggaagggatgaagtttctgtattgcaggagaaatattcactggaacaggtgaaaacatgttggttggagcctgaggatgattgggaggtggccattaaaaattatgccaagatagctttgaggcctgataaacagtataagattactagacggattaatatccggaatgcttgttacatatctggaaatggggctgaggtggtaatagatactcaagacaaggcagttattagatgctgcatgatggatatgtggcctggggtagtcggtatggaagcagtaacttttgtaaatgttaagtttaggggagatggttataatggaatagtgtttatggccaataccaaacttatattgcatggttgtagcttttttggtttcaacaatacctgtgtagatgcctggggacaggttagtgtacggggatgtagtttctatgcgtgttggattgccacagctggcagaaccaagagtcaattgtctctgaagaaatgcatatttcaaagatgtaacctgggcattctgaatgaaggcgaagcaagggtccgccactgcgcttctacagatactggatgttttattttgattaagggaaatgccagcgtaaagcataacatgatttgcggtgcttccgatgagaggccttatcaaatgctcacttgtgctggtgggcattgtaatatgctggctactgtgcatattgtttcccatcaacgcaaaaaatggcctgtttttgatcacaatgtgatgacgaagtgtaccatgcatgcaggtgggcgtagaggaatgtttatgccttaccagtgtaacatgaatcatgtgaaagtgttgttggaaccagatgccttttccagaatgagcctaacaggaatttttgacatgaacatgcaaatctggaagatcctgaggtatgatgatacgagatcgagggtacgcgcatgcgaatgcggaggcaagcatgccaggttccagccggtgtgtgtagatgtgactgaagatctcagaccggatcatttggttattgcccgcactggagcagagttcggatccagtggagaagaaactgactaaggtgagtattgggaaaactttggggtgggattttcagatggacagattgagtaaaaatttgttttttctgtcttgcagctgtcatgagtggaaacgcttcttttaaggggggagtcttcagcccttatctgacagggcgtctcccatcctgggcaggagttcgtcagaatgttatgggatctactgtggatggaagacccgtccaacccgccaattcttcaacgctgacctatgctactttaagttcttcacctttggacgcagctgcagctgccgccgccgcttctgttgccgctaacactgtgcttggaatgggttactatggaagcatcatggctaattccacttcctctaataacccttctaccctgactcaggacaagttacttgtccttttggcccagctggaggctttgacccaacgtctgggtgaactttctcagcaggtggtcgagttgcgagtacaaactgagtctgctgtcggcacggcaaagtctaaataaaaaaatcccagaatcaatgaataaataaacaagcttgttgttgatttaaaatcaagtgtttttatttcatttttcgcgcacggtatgccctagaccaccgatctctatcattgagaactcggtggattttttccaggatcctatagaggtgggattgaatgtttagatacatgggcattaggccgtctttggggtggagatagctccattgaagggattcatgctccggggtagtgttgtaaatcacccagtcataacaaggtcgcagtgcatggtgttgcacaatatcttttagaagtaggctgattgccacagataagcccttggtgtaggtgtttacaaaccggttgagctgggatgggtgcattcggggtgaaattatgtgcattttggattggatttttaagttggcaatattgccgccaagatcccgtcttgggttcatgttatgaaggaccaccaagacggtgtatccggtacatttaggaaatttatcgtgcagcttggatggaaaagcgtggaaaaatttggagacacccttgtgtcctccaagattttccatgcactcatccatgataatagcaatggggccgtgggcagcggcgcgggcaaacacgttccgtgggtctgacacatcatagttatgttcctgagttaaatcatcataagccattttaatgaatttggggcggagagtaccagattggggtatgaatgttccttcgggccccggagcatagttcccctcacagatttgcatttcccaagctttcagttccgagggtggaatcatgtccacctggggggctatgaaaaacaccgtttctggggcgggggtgattaattgtgatgatagcaaatttctgagcaattgagatttgccacatccggtggggccataaatgattccgattacgggttgcaggtggtagtttagggaacggcaactgccgtcttctcgaagcaagggggccacctcgttcatcatttcccttacatgcatattttcccgcaccaaatccattaggaggcgctctcctcctagtgatagaagttcttgtagtgaggaaaagtttttcagcggtttcagaccgtcagccatgggcattttggagagagtttgctgcaaaagttctagtctgttccacagttcagtgatgtgttctatggcatctcgatccagcagacctcctcgtttcgcgggtttggacggctcctggaatagggtatgagacgatgggcgtccagcgctgccagggttcggtccttccagggtctcagtgttcgagtcagggttgtttccgtcacagtgaaggggtgtgcgcctgcttgggcgcttgccagggtgcgcttcagactcatcctgctggtcgaaaacttctgtcgcttggcgccctgtatgtcggccaagtagcagtttaccatgagttcgtagttgagcgcctcggctgcgtggcctttggcgcggagcttacctttggaagttttcttgcataccgggcagtataggcatttcagcgcatacaacttgggcgcaaggaaaacggattctggggagtatgcatctgcgccgcaggaggcgcaaacagtttcacattccaccagccaggttaaatccggttcattggggtcaaaaacaagttttccgccatattttttgatgcgtttcttacctttggtctccatgagttcgtgtcctcgttgagtgacaaacaggctgtccgtgtccccgtagactgattttacaggcctcttctccagtggagtgcctcggtcttcttcgtacaggaactctgaccactctgatacaaaggcgcgcgtccaggccagcacaaaggaggctatgtgggaggggtagcgatcgttgtcaaccagggggtccaccttttccaaagtatgcaaacacatgtcaccctcttcaacatccaggaatgtgattggcttgtaggtgtatttcacgtgacctggggtccccgctgggggggtataaaagggggcggttctttgctcttcctcactgtcttccggatcgctgtccaggaacgtcagctgttggggtaggtattccctctcgaaggcgggcatgacctctgcactcaggttgtcagtttctaagaacgaggaggatttgatattgacagtgccggttgagatgcctttcatgaggttttcgtccatctggtcagaaaacacaatttttttattgtcaagtttggtggcaaatgatccatacagggcgttggataaaagtttggcaatggatcgcatggtttggttcttttccttgtccgcgcgctctttggcggcgatgttgagttggacatactcgcgtgccaggcacttccattcggggaagatagttgttaattcatctggcacgattctcacttgccaccctcgattatgcaaggtaattaaatccacactggtggccacctcgcctcgaaggggttcattggtccaacagagcctacctcctttcctagaacagaaagggggaagtgggtctagcataagttcatcgggagggtctgcatccatggtaaagattcccggaagtaaatccttatcaaaatagctgatgggagtggggtcatctaaggccatttgccattctcgagctgccagtgcgcgctcatatgggttaaggggactgccccatggcatgggatgggtgagtgcagaggcatacatgccacagatgtcatagacgtagatgggatcctcaaagatgcctatgtaggttggatagcatcgcccccctctgatacttgctcgcacatagtcatatagttcatgtgatggcgctagcagccccggacccaagttggtgcgattgggtttttctgttctgtagacgatctggcgaaagatggcgtgagaattggaagagatggtgggtctttgaaaaatgttgaaatgggcatgaggtagacctacagagtctctgacaaagtgggcataagattcttgaagcttggttaccagttcggcggtgacaagtacgtctagggcgcagtagtcaagtgtttcttgaatgatgtcataacctggttggtttttcttttcccacagttcgcggttgagaaggtattcttcgcgatccttccagtactcttctagcggaaacccgtctttgtctgcacggtaagatcctagcatgtagaactgattaactgccttgtaagggcagcagcccttctctacgggtagagagtatgcttgagcagcttttcgtagcgaagcgtgagtaagggcaaaggtgtctctgaccatgactttgaggaattggtatttgaagtcgatgtcgtcacaggctccctgttcccagagttggaagtctacccgtttcttgtaggcggggttgggcaaagcgaaagtaacatcattgaagagaatcttgccggccctgggcatgaaattgcgagtgatgcgaaaaggctgtggtacttccgctcggttattgataacctgggcagctaggacgatctcgtcgaaaccgttgatgttgtgtcctacgatgtataattctatgaaacgcggcgtgcctctgacgtgaggtagcttactgagctcatcaaaggttaggtctgtggggtcagataaggcgtagtgttcgagagcccattcgtgcaggtgaggattcgctttaaggaaggaggaccagaggtccactgccagtgctgtttgtaactggtcccggtactgacgaaaatgccgtccgactgccattttttctggggtgacgcaatagaaggtttgggggtcctgccgccagcgatcccacttgagttttatggcgaggtcataggcgatgttgacgagccgctggtctccagagagtttcatgaccagcatgaaggggattagctgcttgccaaaggaccccatccaggtgtaggtttccacatcgtaggtgagaaagagcctttctgtgcgaggatgagagccaatcgggaagaactggatctcctgccaccagttggaggaatggctgttgatgtgatggaagtagaactccctgcgacgcgccgagcattcatgcttgtgcttgtacagacggccgcagtagtcgcagcgttgcacgggttgtatctcgtgaatgagttgtacctggcttcccttgacgagaaatttcagtgggaagccgaggcctggcgattgtatctcgtgctttactatgttgtctgcatcggcctgttcatcttctgtctcgatggtggtcatgctgacgagccctcgcgggaggcaagtccagacctcggcgcggcaggggcggagctcgaggacgagagcgcgcaggctggagctgtccagggtcctgagacgctgcggactcaggttagtaggcagtgtcaggagattaacttgcatgatcttttggagggcgtgcgggaggttcagatagtacttgatctcaacgggtccgttggtggagatgtcgatggcttgcagggttccgtgtcccttgggcgctaccaccgtgcccttgtttttcattttggacggcggtggctctgttgcttcttgcatgtttagaagcggtgtcgagggcgcgcaccgggcggcaggggcggctcgggacccggcggcatggctggcagtggtacgtcggcgccgcgcgcgggtaggttctggtactgcgccctgagaagactcgcatgcgcgacgacgcggcggttgacatcctggatctgacgcctctgggtgaaagctaccggccccgtgagcttgaacctgaaagagagttcaacagaatcaatctcggtatcgttgacggcggcttgcctaaggatttcttgcacgtcaccagagttgtcctggtaggcgatctccgccatgaactgctcgatctcttcctcttgaagatctccgcggcccgctctctcgacggtggccgcgaggtcgttggagatgcgcccaatgagttgagagaatgcattcatgcccgcctcgttccagacgcggctgtagaccacggcccccacgggatctctcgcgcgcatgaccacctgggcgaggttgagctccacgtggcgggtgaagaccgcatagttgcataggcgctggaaaaggtagttgagtgtggtggcgatgtgctcggtgacgaagaaatacatgatccatcgtctcagcggcatctcgctgacatcgcccagagcttccaagcgctccatggcctcgtagaagtccacggcaaaattaaaaaactgggagtttcgcgcggacacggtcaactcctcttccagaagacggataagttcggcgatggtggtgcgcacctcgcgctcgaaagcccctgggatttcttcctcaatctcttcttcttccactaacatctcttcctcttcaggtggggctgcaggaggagggggaacgcggcgacgccggcggcgcacgggcagacggtcgatgaatctttcaatgacctctccgcggcggcggcgcatggtttcagtgacggcgcggccgttctcgcgcggtcgcagagtaaaaacaccgccgcgcatctccttaaagtggtgactgggaggttctccgtttgggagggagagggcgctgattatacattttattaattggcccgtagggactgcacgcagagatctgatcgtgtcaagatccacgggatctgaaaacctttcgacgaaagcgtctaaccagtcacagtcacaaggtaggctgagtacggcttcttgtgggcgggggtggttatgtgttcggtctgggtcttctgtttcttcttcatctcgggaaggtgagacgatgctgctggtgatgaaattaaagtaggcagttctaagacggcggatggtggcgaggagcaccaggtctttgggtccggcttgctggatacgcaggcgattggccattccccaagcattatcctgacatctagcaagatctttgtagtagtcttgcatgagccgttctacgggcacttcttcctcacccgttctgccatgcatacgtgtgagtccaaatccgcgcattggttgtaccagtgccaagtcagctacgactctttcggcgaggatggcttgctgtacttgggtaagggtggcttgaaagtcatcaaaatccacaaagcggtggtaagctcctgtattaatggtgtaagcacagttggccatgactgaccagttaactgtctggtgaccagggcgcacgagctcggtgtatttaaggcgcgaataggcgcgggtgtcaaagatgtaatcgttgcaggtgcgcaccagatactggtaccctataagaaaatgcggcggtggttggcggtagagaggccatcgttctgtagctggagcgccaggggcgaggtcttccaacataaggcggtgatagccgtagatgtacctggacatccaggtgattcctgcggcggtagtagaagcccgaggaaactcgcgtacgcggttccaaatgttgcgtagcggcatgaagtagttcattgtaggcacggtttgaccagtgaggcgcgcgcagtcattgatgctctatagacacggagaaaatgaaagcgttcagcgactcgactccgtagcctggaggaacgtgaacgggttgggtcgcggtgtaccccggttcgagacttgtactcgagccggccggagccgcggctaacgtggtattggcactcccgtctcgacccagcctacaaaaatccaggatacggaatcgagtcgttttgctggtttccgaatggcagggaagtgagtcctattttttttttttgccgctcagatgcatcccgtgctgcgacagatgcgcccccaacaacagcccccctcgcagcagcagcagcagcaatcacaaaaggctgtccctgcaactactgcaactgccgccgtgagcggtgcgggacagcccgcctatgatctggacttggaagagggcgaaggactggcacgtctaggtgcgccttcacccgagcggcatccgcgagttcaactgaaaaaagattctcgcgaggcgtatgtgccccaacagaacctatttagagacagaagcggcgaggagccggaggagatgcgagcttcccgctttaacgcgggtcgtgagctgcgtcacggtttggaccgaagacgagtgttgcgggacgaggatttcgaagttgatgaaatgacagggatcagtcctgccagggcacacgtggctgcagccaaccttgtatcggcttacgagcagacagtaaaggaagagcgtaacttccaaaagtcttttaataatcatgtgcgaaccctgattgcccgcgaagaagttacccttggtttgatgcatttgtgggatttgatggaagctatcattcagaaccctactagcaaacctctgaccgcccagctgtttctggtggtgcaacacagcagagacaatgaggctttcagagaggcgctgctgaacatcaccgaacccgaggggagatggttgtatgatcttatcaacattctacagagtatcatagtgcaggagcggagcctgggcctggccgagaaggtggctgccatcaattactcggttttgagcttgggaaaatattacgctcgcaaaatctacaagactccatacgttcccatagacaaggaggtgaagatagatgggttctacatgcgcatgacgctcaaggtcttgaccctgagcgatgatcttggggtgtatcgcaatgacagaatgcatcgcgcggttagcgccagcaggaggcgcgagttaagcgacagggaactgatgcacagtttgcaaagagctctgactggagctggaaccgagggtgagaattacttcgacatgggagctgacttgcagtggcagcctagtcgcagggctctgagcgccgcgacggcaggatgtgagcttccttacatagaagaggcggatgaaggcgaggaggaagagggcgagtacttggaagactgatggcacaacccgtgttttttgctagatggaacagcaagcaccggatcccgcaatgcgggcggcgctgcagagccagccgtccggcattaactcctcggacgattggacccaggccatgcaacgtatcatggcgttgacgactcgcaaccccgaagcctttagacagcaaccccaggccaaccgtctatcggccatcatggaagctgtagtgccttcccgctctaatcccactcatgagaaggtcctggccatcgtgaacgcgttggtggagaacaaagctattcgtccagatgaggccggactggtatacaacgctctcttagaacgcgtggctcgctacaacagtagcaatgtgcaaaccaatttggaccgtatgataacagatgtacgcgaagccgtgtctcagcgcgaaaggttccagcgtgatgccaacctgggttcgctggtggcgttaaatgctttcttgagtactcagcctgctaatgtgccgcgtggtcaacaggattatactaactttttaagtgctttgagactgatggtatcagaagtacctcagagcgaagtgtatcagtccggtcctgattacttctttcagactagcagacagggcttgcagacggtaaatctgagccaagcttttaaaaaccttaaaggtttgtggggagtgcatgccccggtaggagaaagagcaaccgtgtctagcttgttaactccgaactcccgcctattattactgttggtagctcctttcaccgacagcggtagcatcgaccgtaattcctatttgggttacctactaaacctgtatcgcgaagccatagggcaaagtcaggtggacgagcagacctatcaagaaattacccaagtcagtcgcgctttgggacaggaagacactggcagtttggaagccactctgaacttcttgcttaccaatcggtctcaaaagatccctcctcaatatgctcttactgcggaggaggagaggatccttagatatgtgcagcagagcgtgggattgtttctgatgcaagagggggcaactccgactgcagcactggacatgacagcgcgaaatatggagcccagcatgtatgccagtaaccgacctttcattaacaaactgctggactacttgcacagagctgccgctatgaactctgattatttcaccaatgccatcttaaacccgcactggctgcccccacctggtttctacacgggcgaatatgacatgcccgaccctaatgacggatttctgtgggacgacgtggacagcgatgttttttcacctctttctgatcatcgcacgtggaaaaaggaaggcggcgatagaatgcattcttctgcatcgctgtccggggtcatgggtgctaccgcggctgagcccgagtctgcaagtccttttcctagtctacccttttctctacacagtgtacgtagcagcgaagtgggtagaataagtcgcccgagtttaatgggcgaagaggagtatctaaacgattccttgctcagaccggcaagagaaaaaaatttcccaaacaatggaatagaaagtttggtggataaaatgagtagatggaagacttatgctcaggatcacagagacgagcctgggatcatggggattacaagtagagcgagccgtagacgccagcgccatgacagacagaggggtcttgtgtgggacgatgaggattcggccgatgatagcagcgtgctggacttgggtgggagaggaaggggcaacccgtttgctcatttgcgccctcgcttgggtggtatgttgtaaaaaaaaataaaaaaaaaactcaccaaggccatggcgacgagcgtacgttcgttcttctttattatctgtgtctagtataatgaggcgagtcgtgctaggcggagcggtggtgtatccggagggtcctcctccttcgtacgagagcgtgatgcagcagcagcaggcgacggcggtgatgcaatccccactggaggctccctttgtgcctccgcgatacctggcacctacggagggcagaaacagcattcgttattcggaactggcacctcagtacgataccaccaggttgtatctggtggacaacaagtcggcggacattgcttctctgaactatcagaatgaccacagcaacttcttgaccacggtggtgcaaaacaatgactttacccctacggaagccagcacccagaccattaactttgatgaacgatcgcggtggggcggtcagctaaagaccatcatgcatactaacatgccaaacgtgaacgagtatatgtttagtaacaagttcaaagcgcgtgtgatggtgtccagaaaacctcccgacggtgctgcagttggggatacttatgatcacaagcaggatattttgaaatatgagtggttcgagtttactttgccagaaggcaacttttcagttactatgactattgatttgatgaacaatgccatcatagataattacttgaaagtgggtagacagaatggagtgcttgaaagtgacattggtgttaagttcgacaccaggaacttcaagctgggatgggatcccgaaaccaagttgatcatgcctggagtgtatacgtatgaagccttccatcctgacattgtcttactgcctggctgcggagtggattttaccgagagtcgtttgagcaaccttcttggtatcagaaaaaaacagccatttcaagagggttttaagattttgtatgaagatttagaaggtggtaatattccggccctcttggatgtagatgcctatgagaacagtaagaaagaacaaaaagccaaaatagaagctgctacagctgctgcagaagctaaggcaaacatagttgccagcgactctacaagggttgctaacgctggagaggtcagaggagacaattttgcgccaacacctgttccgactgcagaatcattattggccgatgtgtctgaaggaacggacgtgaaactcactattcaacctgtagaaaaagatagtaagaatagaagctataatgtgttggaagacaaaatcaacacagcctatcgcagttggtatctttcgtacaattatggcgatcccgaaaaaggagtgcgttcctggacattgctcaccacctcagatgtcacctgcggagcagagcaggtctactggtcgcttccagacatgatgaaggatcctgtcactttccgctccactagacaagtcagtaactaccctgtggtgggtgcagagcttatgcccgtcttctcaaagagcttctacaacgaacaagctgtgtactcccagcagctccgccagtccacctcgcttacgcacgtcttcaaccgctttcctgagaaccagattttaatccgtccgccggcgcccaccattaccaccgtcagtgaaaacgttcctgctctcacagatcacgggaccctgccgttgcgcagcagtatccggggagtccaacgtgtgaccgttactgacgccagacgccgcacctgtccctacgtgtacaaggcactgggcatagtcgcaccgcgcgtcctttcaagccgcactttctaaaaaaaaaaaaaatgtccattcttatctcgcccagtaataacaccggttggggtctgcgcgctccaagcaagatgtacggaggcgcacgcaaacgttctacccaacatcctgtccgtgttcgcggacattttcgcgctccatggggcgccctcaagggccgcactcgcgttcgaaccaccgtcgatgatgtaatcgatcaggtggttgccgacgcccgtaattatactcctactgcgcctacatctactgtggatgcagttattgacagtgtagtggctgacgctcgcaactatgctcgacgtaagagccggcgaaggcgcattgccagacgccaccgagctaccactgccatgcgagccgcaagagctctgctacgaagagctagacgcgtggggcgaagagccatgcttagggcggccagacgtgcagcttcgggcgccagcgccggcaggtcccgcaggcaagcagccgctgtcgcagcggcgactattgccgacatggcccaatcgcgaagaggcaatgtatactgggtgcgtgacgctgccaccggtcaacgtgtacccgtgcgcacccgtccccctcgcacttagaagatactgagcagtctccgatgttgtgtcccagcggcgaggatgtccaagcgcaaatacaaggaagaaatgctgcaggttatcgcacctgaagtctacggccaaccgttgaaggatgaaaaaaaaccccgcaaaatcaagcgggttaaaaaggacaaaaaagaagaggaagatggcgatgatgggctggcggagtttgtgcgcgagtttgccccacggcgacgcgtgcaatggcgtgggcgcaaagttcgacatgtgttgagacctggaacttcggtggtctttacacccggcgagcgttcaagcgctacttttaagcgttcctatgatgaggtgtacggggatgatgatattcttgagcaggcggctgaccgattaggcgagtttgcttatggcaagcgtagtagaataacttccaaggatgagacagtgtcgatacccttggatcatggaaatcccacccctagtcttaaaccggtcactttgcagcaagtgttacccgtaactccgcgaacaggtgttaaacgcgaaggtgaagatttgtatcccactatgcaactgatggtacccaaacgccagaagttggaggacgttttggagaaagtaaaagtggatccagatattcaacctgaggttaaagtgagacccattaagcaggtagcgcctggtctgggggtacaaactgtagacattaagattcccactgaaagtatggaagtgcaaactgaacccgcaaagcctactgccacctccactgaagtgcaaacggatccatggatgcccatgcctattacaactgacgccgccggtcccactcgaagatcccgacgaaagtacggtccagcaagtctgttgatgcccaattatgttgtacacccatctattattcctactcctggttaccgaggcactcgctactatcgcagccgaaacagtacctcccgccgtcgccgcaagacacctgcaaatcgcagtcgtcgccgtagacgcacaagcaaaccgactcccggcgccctggtgcggcaagtgtaccgcaatggtagtgcggaacctttgacactgccgcgtgcgcgttaccatccgagtatcatcacttaatcaatgttgccgctgcctccttgcagatatggccctcacttgtcgccttcgcgttcccatcactggttaccgaggaagaaactcgcgccgtagaagagggatgttgggacgcggaatgcgacgctacaggcgacggcgtgctatccgcaagcaattgcggggtggttttttaccagccttaattccaattatcgctgctgcaattggcgcgataccaggcatagcttccgtggcggttcaggcctcgcaacgacattgacattggaaaaaaacgtataaataaaaaaaaaaaaatacaatggactctgacactcctggtcctgtgactatgttttcttagagatggaagacatcaatttttcatccttggctccgcgacacggcacgaagccgtacatgggcacctggagcgacatcggcacgagccaactgaacgggggcgccttcaattggagcagtatctggagcgggcttaaaaattttggctcaaccataaaaacatacgggaacaaagcttggaacagcagtacaggacaggcgcttagaaataaacttaaagaccagaacttccaacaaaaagtagtcgatgggatagcttccggcatcaatggagtggtagatttggctaaccaggctgtgcagaaaaagataaacagtcgtttggacccgccgccagcaaccccaggtgaaatgcaagtggaggaagaaattcctccgccagaaaaacgaggcgacaagcgtccgcgtcccgatttggaagagacgctggtgacgcgcgtagatgaaccgccttcttatgaggaagcaacgaagcttggaatgcccaccactagaccgatagccccaatggccaccggggtgatgaaaccttctcagttgcatcgacccgtcaccttggatttgccccctccccctgctgctactgctgtacccgcttctaagcctgtcgctgccccgaaaccagtcgccgtagccaggtcacgtcccgggggcgctcctcgtccaaatgcgcactggcaaaatactctgaacagcatcgtgggtctaggcgtgcaaagtgtaaaacgccgtcgctgcttttaattaaatatggagtagcgcttaacttgcctatctgtgtatatgtgtcattacacgccgtcacagcagcagaggaaaaaaggaagaggtcgtgcgtcgacgctgagttactttcaagatggccaccccatcgatgctgccccaatgggcatacatgcacatcgccggacaggatgcttcggagtacctgagtccgggtctggtgcagttcgcccgcgccacagacacctacttcaatctgggaaataagtttagaaatcccaccgtagcgccgacccacgatgtgaccaccgaccgtagccagcggctcatgttgcgcttcgtgcccgttgaccgggaggacaatacatactcttacaaagtgcggtacaccctggccgtgggcgacaacagagtgctggatatggccagcacgttctttgacattaggggtgtgttggacagaggtcccagtttcaaaccctattctggtacggcttacaactccctggctcctaaaggcgctccaaatacatctcagtggattgcagaaggtgtaaaaaatacaactggtgaggaacacgtaacagaagaggaaaccaatactactacttacacttttggcaatgctcctgtaaaagctgaagctgaaattacaaaagaaggactcccagtaggtttggaagtttcagatgaagaaagtaaaccgatttatgctgataaaacatatcagccagaacctcagctgggagatgaaacttggactgaccttgatggaaaaaccgaaaagtatggaggcagggctctcaaacccgatactaagatgaaaccatgctacgggtcctttgccaaacctactaatgtgaaaggcggtcaggcaaaacaaaaaacaacggagcagccaaatcagaaagtcgaatatgatatcgacatggagttttttgatgcggcatcgcagaaaacaaacttaagtcctaaaattgtcatgtatgcagaaaatgtaaatttggaaactccagacactcatgtagtgtacaaacctggaacagaagacacaagttccgaagctaatttgggacaacaatctatgcccaacagacccaactacattggcttcagagataactttattggacttatgtactataacagtactggtaacatgggggtgctggctggtcaagcgtctcagttaaatgcagtggttgacttgcaggacagaaacacagaactttcttaccaactcttgcttgactctctgggcgacagaaccagatactttagcatgtggaatcaggctgtggacagttatgatcctgatgtacgtgttattgaaaatcatggtgtggaagatgaacttcccaactactgttttccactggacggcataggtgttccaacaaccagttacaaatcaatagttccaaatggagacaatgcgcctaattggaaggaacctgaagtaaatggaacaagtgagatcggacagggtaatttgtttgccatggaaattaaccttcaagccaatctatggcgaagtttcctttattccaatgtggctctatatctcccagactcgtacaaatacaccccgtccaatgtcactcttccagaaaacaaaaacacctacgactacatgaacgggcgggtggtgccgccatctctagtagacacctatgtgaacattggtgccaggtggtctctggatgccatggacaatgtcaacccattcaaccaccaccgtaacgctggcttgcgttaccgatccatgcttctgggtaacggacgttatgtgcctttccacatacaagtgcctcaaaaattcttcgctgttaaaaacctgctgcttctcccaggctcctacacttatgagtggaactttaggaaggatgtgaacatggttctacagagttccctcggtaacgacctgcgggtagatggcgccagcatcagtttcacgagcatcaacctctatgctacttttttccccatggctcacaacaccgcttccacccttgaagccatgctgcggaatgacaccaatgatcagtcattcaacgactacctatctgcagctaacatgctctaccccattcctgccaatgcaaccaatattcccatttccattccttctcgcaactgggcggctttcagaggctggtcatttaccagactgaaaaccaaagaaactccctctttggggtctggatttgacccctactttgtctattctggttctattccctacctggatggtaccttctacctgaaccacacttttaagaaggtttccatcatgtttgactcttcagtgagctggcctggaaatgacaggttactatctcctaacgaatttgaaataaagcgcactgtggatggcgaaggctacaacgtagcccaatgcaacatgaccaaagactggttcttggtacagatgctcgccaactacaacatcggctatcagggcttctacattccagaaggatacaaagatcgcatgtattcatttttcagaaacttccagcccatgagcaggcaggtggttgatgaggtcaattacaaagacttcaaggccgtcgccataccctaccaacacaacaactctggctttgtgggttacatggctccgaccatgcgccaaggtcaaccctatcccgctaactatccctatccactcattggaacaactgccgtaaatagtgttacgcagaaaaagttcttgtgtgacagaaccatgtggcgcataccgttctcgagcaacttcatgtctatgggggcccttacagacttgggacagaatatgctctatgccaactcagctcatgctctggacatgacctttgaggtggatcccatggatgagcccaccctgctttatcttctcttcgaagttttcgacgtggtcagagtgcatcagccacaccgcggcatcatcgaggcagtctacctgcgtacaccgttctcggccggtaacgctaccacgtaagaagcttcttgcttcttgcaaatagcagctgcaaccatggcctgcggatcccaaaacggctccagcgagcaagagctcagagccattgtccaagacctgggttgcggaccctattttttgggaacctacgataagcgcttcccggggttcatggcccccgataagctcgcctgtgccattgtaaatacggccggacgtgagacggggggagagcactggttggctttcggttggaacccacgttctaacacctgctacctttttgatccttttggattctcggatgatcgtctcaaacagatttaccagtttgaatatgagggtctcctgcgccgcagcgctcttgctaccaaggaccgctgtattacgctggaaaaatctacccagaccgtgcagggtccccgttctgccgcctgcggacttttctgctgcatgttccttcacgcctttgtgcactggcctgaccgtcccatggacggaaaccccaccatgaaattgctaactggagtgccaaacaacatgcttcattctcctaaagtccagcccaccctgtgtgacaatcaaaaagcactctaccattttcttaatacccattcgccttattttcgctcccatcgtacacacatcgaaagggccactgcgttcgaccgtatggatgttcaataatgactcatgtaaacaacgtgttcaataaacatcactttatttttttacatgtatcaaggctctgcattacttatttatttacaagtcgaatgggttctgacgagaatcagaatgacccgcaggcagtgatacgttgcggaactgatacttgggttgccacttgaattcgggaatcaccaacttgggaaccggtatatcgggcaggatgtcactccacagctttctggtcagctgcaaagctccaagcaggtcaggagccgaaatcttgaaatcacaattaggaccagtgctttgagcgcgagagttgcggtacaccggattgcagcactgaaacaccatcagcgacggatgtctcacgcttgccagcacggtgggatctgcaatcatgcccacatccagatcttcagcattggcaatgctgaacggggtcatcttgcaggtctgcctacccatggcgggcacccaattaggcttgtggttgcaatcgcagtgcagggggatcagtatcatcttggcctgatcctgtctgattcctggatacacggctctcatgaaagcatcatattgcttgaaagcctgctgggctttactaccctcggtataaaacatcccgcaggacctgctcgaaaactggttagctgcacagccggcatcattcacacagcagcgggcgtcattgttagctatttgcaccacacttctgccccagcggttttgggtgattttggttcgctcgggattctcctttaaggctcgttgtccgttctcgctggccacatccatctcgataatctgctccttctgaatcataatattgccatgcaggcacttcagcttgccctcataatcattgcagccatgaggccacaacgcacagcctgtacattcccaattatggtgggcgatctgagaaaaagaatgtatcattccctgcagaaatcttcccatcatcgtgctcagtgtcttgtgactagtgaaagttaactggatgcctcggtgctcctcgtttacgtactggtgacagatgcgcttgtattgttcgtgttgctcaggcattagtttaaaagaggttctaagttcgttatccagcctgtacttctccatcagcagacacatcacttccatgcctttctcccaagcagacaccaggggcaagctaatcggattcttaacagtgcaggcagcagctcctttagccagagggtcatctttagcgatcttctcaatgcttcttttgccatccttctcaacgatgcgcacgggcgggtagctgaaacccactgctacaagttgcgcctcttctctttcttcttcgctgtcttgactgatgtcttgcatggggatatgtttggtcttccttggcttctttttggggggtatcggaggaggaggactgtcgctccgttccggagacagggaggattgtgacgtttcgctcaccattaccaactgactgtcggtagaagaacctgaccccacacggcgacaggtgtttctcttcgggggcagaggtggaggcgattgcgaagggctgcggtccgacctggaaggcggatgactggcagaaccccttccgcgttcgggggtgtgctccctgtggcggtcgcttaactgatttccttcgcggctggccattgtgttctcctaggcagagaaacaacagacatggaaactcagccattgctgtcaacatcgccacgagtgccatcacatctcgtcctcagcgacgaggaaaaggagcagagcttaagcattccaccgcccagtcctgccaccacctctaccctagaagataaggaggtcgacgcatctcatgacatgcagaataaaaaagcgaaagagtctgagacagacatcgagcaagacccgggctatgtgacaccggtggaacacgaggaagagttgaaacgctttctagagagagaggatgaaaactgcccaaaacaacgagcagataactatcaccaagatgctggaaatagggatcagaacaccgactacctcatagggcttgacggggaagacgcgctccttaaacatctagcaagacagtcgctcatagtcaaggatgcattattggacagaactgaagtgcccatcagtgtggaagagctcagccgcgcctacgagcttaacctcttttcacctcgtactccccccaaacgtcagccaaacggcacctgcgagccaaatcctcgcttaaacttttatccagcttttgctgtgccagaagtactggctacctatcacatcttttttaaaaatcaaaaaattccagtctcctgccgcgctaatcgcacccgcgccgatgccctactcaatctgggacctggttcacgcttacctgatatagcttccttggaagaggttccaaagatcttcgagggtctgggcaataatgagactcgggccgcaaatgctctgcaaaagggagaaaatggcatggatgagcatcacagcgttctggtggaattggaaggcgataatgccagactcgcagtactcaagcgaagcatcgaggtcacacacttcgcatatcccgctgtcaacctgccccctaaagtcatgacggcggtcatggaccagttactcattaagcgcgcaagtcccctttcagaagacatgcatgacccagatgcctgtgatgagggtaaaccagtggtcagtgatgagcagctaacccgatggctgggcaccgactctcccagggatttggaagagcgtcgcaagcttatgatggccgtggtgctggttaccgtagaactagagtgtctccgacgtttctttaccgattcagaaaccttgcgcaaactcgaagagaatctgcactacacttttagacacggctttgtgcggcaggcatgcaagatatctaacgtggaactcaccaacctggtttcctacatgggtattctgcatgagaatcgcctaggacaaagcgtgctgcacagcaccctgaagggggaagcccgccgtgattacatccgcgattgtgtctatctgtacctgtgccacacgtggcaaaccggcatgggtgtatggcagcaatgtttagaagaacagaacttgaaagagcttgacaagctcttacagaaatctcttaaggttctgtggacagggttcgacgagcgcaccgtcgcttccgacctggcagacctcatcttcccagagcgtctcagggttactttgcgaaacggattgcctgactttatgagccagagcatgcttaacaattttcgctctttcatcctggaacgctccggtatcctgcccgccacctgctgcgcactgccctccgactttgtgcctctcacctaccgcgagtgccccccgccgctatggagtcactgctacctgttccgtctggccaactatctctcctaccactcggatgtgatcgaggatgtgagcggagacggcttgctggagtgtcactgccgctgcaatctgtgcacgccccaccggtccctagcttgcaacccccagttgatgagcgaaacccagataataggcacctttgaattgcaaggccccagcagccaaggcgatgggtcttctcctgggcaaagtttaaaactgaccccgggactgtggacctccgcctacttgcgcaagtttgctccggaagattaccacccctatgaaatcaagttctatgaggaccaatcacagcctccaaaggccgaactttcggcctgcgtcatcacccagggggcaattctggcccaattgcaagccatccaaaaatcccgccaagaatttctactgaaaaagggtaagggggtctaccttgacccccagaccggcgaggaactcaacacaaggttccctcaggatgtcccaacgacgagaaaacaagaagttgaaggtgcagccgccgcccccagaagatatggaggaagattgggacagtcaggcagaggaggcggaggaggacagtctggaggacagtctggaggaagacagtttggaggaggaaaacgaggaggcagaggaggtggaagaagtaaccgccgacaaacagttatcctcggctgcggagacaagcaacagcgctaccatctccgctccgagtcgaggaacccggcggcgtcccagcagtagatgggacgagaccggacgcttcccgaacccaaccagcgcttccaagaccggtaagaaggatcggcagggatacaagtcctggcgggggcataagaatgccatcatctcctgcttgcatgagtgcgggggcaacatatccttcacgcggcgctacttgctattccaccatggggtgaactttccgcgcaatgttttgcattactaccgtcacctccacagcccctactatagccagcaaatcccggcagtctcgacagataaagacagcggcggcgacctccaacagaaaaccagcagcggcagttagaaaatacacaacaagtgcagcaacaggaggattaaagattacagccaacgagccagcgcaaacccgagagttaagaaatcggatctttccaaccctgtatgccatcttccagcagagtcggggtcaagagcaggaactgaaaataaaaaaccgatctctgcgttcgctcaccagaagttgtttgtatcacaagagcgaagatcaacttcagcgcactctcgaggacgccgaggctctcttcaacaagtactgcgcgctgactcttaaagagtaggcagcgaccgcgcttattcaaaaaaggcgggaattacatcatcctcgacatgagtaaagaaattcccacgccttacatgtggagttatcaaccccaaatgggattggcggcaggcgcctcccaggactactccacccgcatgaattggctcagcgccgggccttctatgatttctcgagttaatgatatacgcgcctaccgaaaccaaatacttttggaacagtcagctcttaccaccacgccccgccaacaccttaatcccagaaattggcccgccgccctagtgtaccaggaaagtcccgctcccaccactgtattacttcctcgagacgcccaggccgaagtccaaatgactaatgcaggtgcgcagttagctggcggctccaccctatgtcgtcacaggcctcggcataatataaaacgcctgatgatcagaggccgaggtatccagctcaacgacgagtcggtgagctctccgcttggtctacgaccagacggaatctttcagattgccggctgcgggagatcttccttcacccctcgtcaggctgttctgactttggaaagttcgtcttcgcaaccccgctcgggcggaatcgggaccgttcaatttgtggaggagtttactccctctgtctacttcaaccccttctccggatctcctgggcattacccggacgagttcataccgaacttcgacgcgattagcgagtcagtggacggctacgattgatgtctggtgacgcggctgagctatctcggctgcgacatctagaccactgccgccgctttcgctgctttgcccgggaactcattgagttcatctacttcgaactccccaaggatcaccctcaaggtccggcccacggagtgcggatttctatcgaaggcaaaatagactctcgcctgcaacgaattttctcccagcggcccgtgctgatcgagcgagaccagggaaacaccacggtttccatctactgcatttgtaatcaccccggattgcatgaaagcctttgctgtcttatgtgtactgagtttaataaaaactgaattaagactctcctacggactgccgcttcttcaacccggattttacaaccagaagaacgaaacttttcctgtcgtccaggactctgttaacttcacctttcctactcacaaactagaagctcaacgactacaccgcttttccagaagcattttccctactaatactactttcaaaaccggaggtgagctccaaggtcttcctacagaaaacccttgggtggaagcgggccttgtagtgctaggaattcttgcgggtgggcttgtgattattctttgctacctatacacaccttgcttcactttcttagtggtgttgtggtattggtttaaaaaatggggcccatactagtcttgcttgttttactttcgcttttggaaccgggttctgccaattacgatccatgtctagacttcgacccagaaaactgcacacttacttttgcacccgacacaagccgcatctgtggagttcatcgcctctcttacgaacttggcccccaacgacaaaaatttacctgcatggtgggaatcaaccccatagttatcacccagcaaagtggagatactaagggttgcattcactgctcctgcgattccatcgagtgcacctacaccctgctgaagaccctatgcggcctaagagacctgctaccaatgaattaaaaaatgattaataaaaaatcacttacttgaaatcagcaataaggtctctgttgaaattttctcccagcagcacctcacttccctcttcccaactctggtattctaaaccccgttcagcggcatactttctccatactttaaaggggatgtcaaattttagctcctctcctgtacccacaatcttcatgtctttcttcccagatgaccaagagagtccggctcagtgactccttcaaccctgtctacccctatgaagatgaaagcacctcccaacacccctttataaacccagggtttatttccccaaatggcttcacacaaagcccaaacggagttcttactttaaaatgtttaaccccactaacaaccacaggcggatctctacagctaaaagtgggagggggacttacagtggatgacaccaacggttttttgaaagaaaacataagtgccaccacaccactcgttaagactggtcactctataggtttaccactaggagccggattgggaacgaatgaaaataaactttgtatcaaattaggacaaggacttacattcaattcaaacaacatttgcattgatgacaatattaacaccttatggacaggagtcaaccccaccgaagccaactgtcaaatcatgaactccagtgaatctaatgattgcaaattaattctaacactagttaaaactggagcactagtcactgcatttgtttatgttataggagtatctaacaattttaatatgctaactacacacagaaatataaattttactgcagagctgtttttcgattctactggtaatttactaactagactctcatccctcaaaactccacttaatcataaatcaggacaaaacatggctactggtgccattactaatgctaaaggtttcatgcccagcacgactgcctatcctttcaatgataattctagagaaaaagaaaactacatttacggaacttgttactacacagctagtgatcgcactgcttttcccattgacatatctgtcatgcttaaccgaagagcaataaatgacgagacatcatattgtattcgtataacttggtcctggaacacaggagatgccccagaggtgcaaacctctgctacaaccctagtcacctccccatttaccttttactacatcagagaagacgactgacaaataaagtttgcgatcgccaggcccaccatggactggacctggcgcatcctgttcttggtggcagctgctacgggagctcattccaactgggtgaatgtaataagtgatttgaaaaaaattgaagatcttattcaatctatgcatattgatgctactttatatacggaaagtgatgttcaccccagttgcaaagtaacagcaatgaagtgctttctcttggagttacaagttatttcacttgagtccggagatgcaagtattcatgatacagtagaaaatctgatcatcctagcaaacaacagtttgtcttctaatgggaatgtaacagaatctggatgcaaagaatgtgaggaactggaggaaaaaaatattaaagaatttttgcagagttttgtacatattgtccaaatgttcatcaacacttctggaagcggagagggcagaggaagtctgctaacatgcggtgacgtcgaggagaatcctggacctgcccaatctctcgcacttagtctgctcattctcgtgcttgctttcgggattccaagaactcagggaagcgacggcggtgcccaagattgctgtctgaaatatagtcagagaaaaatccctgctaaagtggttcggagttatcgcaaacaagagcccagtttggggtgttcaattcccgcaattctctttttaccacggaaacggtcccaagctgaactgtgcgctgatcctaaagaactgtgggtccaacagctcatgcaacaccttgataaaaccccttctccccaaaagcctgctcaagggggaagcggagctactaacttcagcctgctgaagcaggctggagacgtggaggagaaccctggacctgccttgacctttgctttactggtggccctcctggtgctcagctgcaagtcaagctgctctgtgggctgtgatctgcctcaaacccacagcctgggtagcaggaggaccttgatgctcctggcacagatgaggagaatctctcttttctcctgcttgaaggacagacatgactttggatttccccaggaggagtttggcaaccagttccaaaaggctgaaaccatccctgtcctccatgagatgatccagcagatcttcaatctcttcagcacaaaggactcatctgctgcttgggatgagaccctcctagacaaattctacactgaactctaccagcagctgaatgacctggaagcctgtgtgatacagggggtgggggtgacagagactcccctgatgaaggaggactccattctggctgtgaggaaatacttccaaagaatcactctctatctgaaagagaagaaatacagcccttgtgcctgggaggttgtcagagcagaaatcatgagatctttttctttgtcaacaaacttgcaagaaagtttaagaagtaaggaaggaagcggacagtgtactaattatgctctcttgaaattggctggagatgttgagagcaaccctggacctaagaaaagtggtgttcttttcctcttgggcatcatcttgctggttctgattggagtgcaaggaaccccagtagtgagaaagggtcgctgttcctgcatcagcaccaaccaagggactatccacctacaatccttgaaagaccttaaacaatttgccccaagcccttcctgcgagaaaattgaaatcattgctacactgaagaatggagttcaaacatgtctaaacccagattcagcagatgtgaaggaactgattaaaaagtgggagaaacaggtcagccaaaagaaaaagcaaaagaatgggaaaaaacatcaaaaaaagaaagttctgaaagttcgaaaatctcaacgttctcgtcaaaagaagactacaggaagcggagtgaaacagactttgaattttgaccttctcaagttggcgggagacgtggagtccaaccctggacctatgtgtcaccagcagttggtcatctcttggttttccctggtttttctggcatctcccctcgtggccatatgggaactgaagaaagatgtttatgtcgtagaattggattggtatccggatgcccctggagaaatggtggtcctcacctgtgacacccctgaagaagatggtatcacctggaccttggaccagagcagtgaggtcttaggctctggcaaaaccctgaccatccaagtcaaagagtttggagatgctggccagtacacctgtcacaaaggaggcgaggttctaagccattcgctcctgctgcttcacaaaaaggaagatggaatttggtccactgatattttaaaggaccagaaagaacccaaaaataagacctttctaagatgcgaggccaagaattattctggacgtttcacctgctggtggctgacgacaatcagtactgatttgacattcagtgtcaaaagcagcagaggctcttctgacccccaaggggtgacgtgcggagctgctacactctctgcagagagagtcagaggggacaacaaggagtatgagtactcagtggagtgccaggaggacagtgcctgcccagctgctgaggagagtctgcccattgaggtcatggtggatgccgttcacaagctcaagtatgaaaactacaccagcagcttcttcatcagggacatcatcaaacctgacccacccaagaacttgcagctgaagccattaaagaattctcggcaggtggaggtcagctgggagtaccctgacacctggagtactccacattcctacttctccctgacattctgcgttcaggtccagggcaagagcaagagagaaaagaaagatagagtcttcacggacaagacctcagccacggtcatctgccgcaaaaatgccagcattagcgtgcgggcccaggaccgctactatagctcatcttggagcgaatgggcatctgtgccctgcagtggagggggcggcagcgggggaggcggcagcggcggcgggggatcgagaaacctccccgtggccactccagacccaggaatgttcccatgccttcaccactcccaaaacctgctgagggccgtcagcaacatgctccagaaggccagacaaactctagaattttacccttgcacttctgaagagattgatcatgaagatatcacaaaagataaaaccagcacagtggaggcctgtttaccattggaattaaccaagaatgagagttgcctaaattccagagagacctctttcataactaatgggagttgcctggcctccagaaagacctcttttatgatggccctgtgccttagtagtatttatgaagacttgaagatgtaccaggtggagttcaagaccatgaatgcaaagcttctgatggatcctaagaggcagatctttctagatcaaaacatgctggcagttattgatgagctgatgcaggccctgaatttcaacagtgagactgtgccacaaaaatcctcccttgaagaaccggatttttataaaactaaaatcaagctctgcatacttcttcatgctttcagaattcgggcagtgactattgatagagtgatgagctatctgaatgcttcctaagctagcttgactgactgagatacagcgtaccttcagctcacagacatgataagatacattgatgagtttggacaaaccacaactagaatgcagtgaaaaaaatgctttatttgtgaaatttgtgatgctattgctttatttgtaaccattataagctgcaataaacaagttaacaacaacaattgcattcattttatgtttcaggttcagggggaggtgtgggaggttttttaaagcaagtaaaacctctacaaatgtggtagtcgtcagctatcctgcaggaacttgtttatttgaaaatcaattcacaaaatccgagtagttattttgcctcccccttcccatttaacagaatacaccaatctctccccacgcacagctttaaacatttggataccattagatatagacatggttttagattccacattccaaacagtttcagagcgagccaatctggggtcagtgatagataaaaatccatcgggatagtcttttaaagcgctttcacagtccaactgctgcggatgcgactccggagtctggatcacggtcatctggaagaagaacgatgggaatcataatccgaaaacggtatcggacgattgtgtctcatcaaacccacaagcagccgctgtctgcgtcgctccgtgcgactgctgtttatgggatcagggtccacagtgtcctgaagcatgattttaatagcccttaacatcaactttctggtgcgatgcgcgcagcaacgcattctgatttcactcaaatctttgcagtaggtacaacacattattacaatattgtttaataaaccataattaaaagcgctccagccaaaactcatatctgatataatcgcccctgcatgaccatcataccaaagtttaatataaattaaatgacgttccctcaaaaacacactacccacatacatgatctcttttggcatgtgcatattaacaatctgtctgtaccatggacaacgttggttaatcatgcaacccaatataaccttccggaaccacactgccaacaccgctcccccagccatgcattgaagtgaaccctgctgattacaatgacaatgaagaacccaattctctcgaccgtgaatcacttgagaatgaaaaatatctatagtggcacaacatagacataaatgcatgcatcttctcataatttttaactcctcaggatttagaaacatatcccagggaataggaagctcttgcagaacagtaaagctggcagaacaaggaagaccacgaacacaacttacactatgcatagtcatagtatcacaatctggcaacagcgggtggtcttcagtcatagaagctcgggtttcattttcctcacaacgtggtaactgggctctggtgtaagggtgatgtctggcgcatgatgtcgagcgtgcgcgcaaccttgtcataatggagttgcttcctgacattctcgtattttgtatagcaaaacgcggccctggcagaacacactcttcttcgccttctatcctgccgcttagcgtgttccgtgtgatagttcaagtacaaccacactcttaagttggtcaaaagaatgctggcttcagttgtaatcaaaactccatcgcatctaatcgttctgaggaaatcatccaagcaatgcaactggattgtgtttcaagcaggagaggagagggaagagacggaagaaccatgttaatttttattccaaacgatctcgcagtacttcaaattgtagatcgcgcagatggcatctctcgcccccactgtgttggtgaaaaagcacagctagatcaaaagaaatgcgattttcaaggtgctcaacggtggcttccagcaaagcctccacgcgcacatccaagaacaaaagaataccaaaagaaggagcattttctaactcctcaatcatcatattacattcctgcaccattcccagataattttcagctttccagccttgaattattcgtgtcagttcttgtggtaaatccaatccacacattacaaacaggtcccggagggcgccctccaccaccattcttaaacacaccctcataatgacaaaatatcttgctcctgtgtcacctgtagcgaattgagaatggcaacatcaattgacatgcccttggctctaagttcttctttaagttctagttgtaaaaactctctcatattatcaccaaactgcttagccagaagccccccgggaacaagagcaggggacgctacagtgcagtacaagcgcagacctccccaattggctccagcaaaaacaagattggaataagcatattgggaaccgccagtaatatcatcgaagttgctggaaatataatcaggcagagtttcttgtaaaaattgaataaaagaaaaatttgccaaaaaaacattcaaaacctctgggatgcaaatgcaataggttaccgcgctgcgctccaacattgttagttttgaattagtctgcaaaaataaaaaaaaaaacaagcgtcatatcatagtagcctgacgaacagatggataaatcagtctttccatcacaagacaagccacagggtctccagctcgaccctcgtaaaacctgtcatcatgattaaacaacagcaccgaaagttcctcgcggtgaccagcatgaataattcttgatgaagcatacaatccagacatgttagcatcagttaacgagaaaaaacagccaacatagcctttgggtataattatgcttaatcgtaagtatagcaaagccacccctcgcggatacaaagtaaaaggcacaggagaataaaaaatataattatttctctgctgctgttcaggcaacgtcgcccccggtccctctaaatacacatacaaagcctcatcagccatggcttaccagacaaagtacagcgggcacacaaagcacaagctctaaagtgactctccaacctctccacaatatatatatacacaagccctaaactgacgtaatgggagtaaagtgtaaaaaatcccgccaaacccaacacacaccccgaaactgcgtcaccagggaaaagtacagtttcacttccgcaatcccaacaggcgtaacttcctctttctcacggtacgtgatatcccactaacttgcaacgtcattttcccacggtcgcaccgccccttttagccgttaaccccacagccaatcaccacacgatccacactttttaaaatcacctcatttacatattggcaccattccatctataaggtatattatatagataga

SEQ ID NO: 114 - DNA, 36157 bp, Artificial Sequence
  Genome sequence of NG-773 virus
tctatctatataatataccttatagatggaatggtgccaatatgtaaatgaggtgattttaaaaagtgtggatcgtgtggtgattggctgtggggttaacggctaaaaggggcggtgcgaccgtgggaaaatgacgttttgtgggggtggagtttttttgcaagttgtcgcgggaaatgtgacgcataaaaaggcttttttctcacggaactacttagttttcccacggtatttaacaggaaatgaggtagttttgaccggatgcaagtgaaaattgttgattttcgcgcgaaaactgaatgaggaagtgtttttctgaataatgtggtatttatggcagggtggagtatttgttcagggccaggtagactttgacccattacgtggaggtttcgattaccgtgttttttacctgaatttccgcgtaccgtgtcaaagtcttctgtttttacgtaggtgtcagctgatcgctagggtatttatacctcagggtttgtgtcaagaggccactcttgagtgccagcgagaagagttttctcctctgcgccggcagtttaataataaaaaaatgagagatttgcgatttctgcctcaggaaataatctctgctgagactggaaatgaaatattggagcttgtggtgcacgccctgatgggagacgatccggagccacctgtgcagctttttgagcctcctacgcttcaggaactgtatgatttagaggtagagggatcggaggattctaatgaggaagctgtaaatggcttttttaccgattctatgcttttagctgctaatgaagggttagaattagatccgcctttggacacttttgatactccaggggtaattgtggaaagcggtacaggtgtaagaaaattacctgatttgagttccgtggactgtgatttgcactgctatgaagacgggtttcctccgagtgatgaggaggaccatgaaaaggagcagtccatgcagactgcagcgggtgagggagtgaaggctgccaatgttggttttcagttggattgcccggagcttcctggacatggctgtaagtcttgtgaatttcacaggaaaaatactggagtaaaggaactgttatgttcgctttgttatatgagaacgcactgccactttatttacagtaagtgtgtttaagttaaaatttaaaggaatatgctgtttttcacatgtatattgagtgtgagttttgtgcttcttattataggtcctgtgtctgatgctgatgaatcaccatctcctgattctactacctcacctcctgagattcaagcacctgttcctgtggacgtgcgcaagcccattcctgtgaagcttaagcctgggaaacgtccagcagtggaaaaacttgaggacttgttacagggtggggacggacctttggacttgagtacacggaaacgtccaagacaataagtgttccatatccgtgtttacttaaggtgacgtcaatatttgtgtgacagtgcaatgtaataaaaatatgttaactgttcactggtttttattgctttttgggcggggactcaggtatataagtagaagcagacctgtgtggttagctcataggagctggctttcatccatggaggtttgggccattttggaagaccttaggaagactaggcaactgttagagaacgcttcggacggagtctccggtttttggagattctggttcgctagtgaattagctagggtagtttttaggataaaacaggactataaacaagaatttgaaaagttgttggtagattgcccaggactttttgaagctcttaatttgggccatcaggttcactttaaagaaaaagttttatcagttttagacttttcaaccccaggtagaactgctgctgctgtggcttttcttacttttatattagataaatggatcccgcagactcatttcagcaggggatacgttttggatttcatagccacagcattgtggagaacatggaaggttcgcaagatgaggacaatcttaggttactggccagtgcagcctttgggtgtagcgggaatcctgaggcatccaccggtcatgccagcggttctggaggaggaacagcaagaggacaacccgagagccggcctggaccctccagtggaggaggcggagtagctgacttgtctcctgaactgcaacgggtgcttactggatctacgtccactggacgggataggggcgttaagagggagagggcatctagtggtactgatgctagatctgagttggctttaagtttaatgagtcgcagacgtcctgaaaccatttggtggcatgaggttcagaaagagggaagggatgaagtttctgtattgcaggagaaatattcactggaacaggtgaaaacatgttggttggagcctgaggatgattgggaggtggccattaaaaattatgccaagatagctttgaggcctgataaacagtataagattactagacggattaatatccggaatgcttgttacatatctggaaatggggctgaggtggtaatagatactcaagacaaggcagttattagatgctgcatgatggatatgtggcctggggtagtcggtatggaagcagtaacttttgtaaatgttaagtttaggggagatggttataatggaatagtgtttatggccaataccaaacttatattgcatggttgtagcttttttggtttcaacaatacctgtgtagatgcctggggacaggttagtgtacggggatgtagtttctatgcgtgttggattgccacagctggcagaaccaagagtcaattgtctctgaagaaatgcatatttcaaagatgtaacctgggcattctgaatgaaggcgaagcaagggtccgccactgcgcttctacagatactggatgttttattttgattaagggaaatgccagcgtaaagcataacatgatttgcggtgcttccgatgagaggccttatcaaatgctcacttgtgctggtgggcattgtaatatgctggctactgtgcatattgtttcccatcaacgcaaaaaatggcctgtttttgatcacaatgtgatgacgaagtgtaccatgcatgcaggtgggcgtagaggaatgtttatgccttaccagtgtaacatgaatcatgtgaaagtgttgttggaaccagatgccttttccagaatgagcctaacaggaatttttgacatgaacatgcaaatctggaagatcctgaggtatgatgatacgagatcgagggtacgcgcatgcgaatgcggaggcaagcatgccaggttccagccggtgtgtgtagatgtgactgaagatctcagaccggatcatttggttattgcccgcactggagcagagttcggatccagtggagaagaaactgactaaggtgagtattgggaaaactttggggtgggattttcagatggacagattgagtaaaaatttgttttttctgtcttgcagctgtcatgagtggaaacgcttcttttaaggggggagtcttcagcccttatctgacagggcgtctcccatcctgggcaggagttcgtcagaatgttatgggatctactgtggatggaagacccgtccaacccgccaattcttcaacgctgacctatgctactttaagttcttcacctttggacgcagctgcagctgccgccgccgcttctgttgccgctaacactgtgcttggaatgggttactatggaagcatcatggctaattccacttcctctaataacccttctaccctgactcaggacaagttacttgtccttttggcccagctggaggctttgacccaacgtctgggtgaactttctcagcaggtggtcgagttgcgagtacaaactgagtctgctgtcggcacggcaaagtctaaataaaaaaatcccagaatcaatgaataaataaacaagcttgttgttgatttaaaatcaagtgtttttatttcatttttcgcgcacggtatgccctagaccaccgatctctatcattgagaactcggtggattttttccaggatcctatagaggtgggattgaatgtttagatacatgggcattaggccgtctttggggtggagatagctccattgaagggattcatgctccggggtagtgttgtaaatcacccagtcataacaaggtcgcagtgcatggtgttgcacaatatcttttagaagtaggctgattgccacagataagcccttggtgtaggtgtttacaaaccggttgagctgggatgggtgcattcggggtgaaattatgtgcattttggattggatttttaagttggcaatattgccgccaagatcccgtcttgggttcatgttatgaaggaccaccaagacggtgtatccggtacatttaggaaatttatcgtgcagcttggatggaaaagcgtggaaaaatttggagacacccttgtgtcctccaagattttccatgcactcatccatgataatagcaatggggccgtgggcagcggcgcgggcaaacacgttccgtgggtctgacacatcatagttatgttcctgagttaaatcatcataagccattttaatgaatttggggcggagagtaccagattggggtatgaatgttccttcgggccccggagcatagttcccctcacagatttgcatttcccaagctttcagttccgagggtggaatcatgtccacctggggggctatgaaaaacaccgtttctggggcgggggtgattaattgtgatgatagcaaatttctgagcaattgagatttgccacatccggtggggccataaatgattccgattacgggttgcaggtggtagtttagggaacggcaactgccgtcttctcgaagcaagggggccacctcgttcatcatttcccttacatgcatattttcccgcaccaaatccattaggaggcgctctcctcctagtgatagaagttcttgtagtgaggaaaagtttttcagcggtttcagaccgtcagccatgggcattttggagagagtttgctgcaaaagttctagtctgttccacagttcagtgatgtgttctatggcatctcgatccagcagacctcctcgtttcgcgggtttggacggctcctggaatagggtatgagacgatgggcgtccagcgctgccagggttcggtccttccagggtctcagtgttcgagtcagggttgtttccgtcacagtgaaggggtgtgcgcctgcttgggcgcttgccagggtgcgcttcagactcatcctgctggtcgaaaacttctgtcgcttggcgccctgtatgtcggccaagtagcagtttaccatgagttcgtagttgagcgcctcggctgcgtggcctttggcgcggagcttacctttggaagttttcttgcataccgggcagtataggcatttcagcgcatacaacttgggcgcaaggaaaacggattctggggagtatgcatctgcgccgcaggaggcgcaaacagtttcacattccaccagccaggttaaatccggttcattggggtcaaaaacaagttttccgccatattttttgatgcgtttcttacctttggtctccatgagttcgtgtcctcgttgagtgacaaacaggctgtccgtgtccccgtagactgattttacaggcctcttctccagtggagtgcctcggtcttcttcgtacaggaactctgaccactctgatacaaaggcgcgcgtccaggccagcacaaaggaggctatgtgggaggggtagcgatcgttgtcaaccagggggtccaccttttccaaagtatgcaaacacatgtcaccctcttcaacatccaggaatgtgattggcttgtaggtgtatttcacgtgacctggggtccccgctgggggggtataaaagggggcggttctttgctcttcctcactgtcttccggatcgctgtccaggaacgtcagctgttggggtaggtattccctctcgaaggcgggcatgacctctgcactcaggttgtcagtttctaagaacgaggaggatttgatattgacagtgccggttgagatgcctttcatgaggttttcgtccatctggtcagaaaacacaatttttttattgtcaagtttggtggcaaatgatccatacagggcgttggataaaagtttggcaatggatcgcatggtttggttcttttccttgtccgcgcgctctttggcggcgatgttgagttggacatactcgcgtgccaggcacttccattcggggaagatagttgttaattcatctggcacgattctcacttgccaccctcgattatgcaaggtaattaaatccacactggtggccacctcgcctcgaaggggttcattggtccaacagagcctacctcctttcctagaacagaaagggggaagtgggtctagcataagttcatcgggagggtctgcatccatggtaaagattcccggaagtaaatccttatcaaaatagctgatgggagtggggtcatctaaggccatttgccattctcgagctgccagtgcgcgctcatatgggttaaggggactgccccatggcatgggatgggtgagtgcagaggcatacatgccacagatgtcatagacgtagatgggatcctcaaagatgcctatgtaggttggatagcatcgcccccctctgatacttgctcgcacatagtcatatagttcatgtgatggcgctagcagccccggacccaagttggtgcgattgggtttttctgttctgtagacgatctggcgaaagatggcgtgagaattggaagagatggtgggtctttgaaaaatgttgaaatgggcatgaggtagacctacagagtctctgacaaagtgggcataagattcttgaagcttggttaccagttcggcggtgacaagtacgtctagggcgcagtagtcaagtgtttcttgaatgatgtcataacctggttggtttttcttttcccacagttcgcggttgagaaggtattcttcgcgatccttccagtactcttctagcggaaacccgtctttgtctgcacggtaagatcctagcatgtagaactgattaactgccttgtaagggcagcagcccttctctacgggtagagagtatgcttgagcagcttttcgtagcgaagcgtgagtaagggcaaaggtgtctctgaccatgactttgaggaattggtatttgaagtcgatgtcgtcacaggctccctgttcccagagttggaagtctacccgtttcttgtaggcggggttgggcaaagcgaaagtaacatcattgaagagaatcttgccggccctgggcatgaaattgcgagtgatgcgaaaaggctgtggtacttccgctcggttattgataacctgggcagctaggacgatctcgtcgaaaccgttgatgttgtgtcctacgatgtataattctatgaaacgcggcgtgcctctgacgtgaggtagcttactgagctcatcaaaggttaggtctgtggggtcagataaggcgtagtgttcgagagcccattcgtgcaggtgaggattcgctttaaggaaggaggaccagaggtccactgccagtgctgtttgtaactggtcccggtactgacgaaaatgccgtccgactgccattttttctggggtgacgcaatagaaggtttgggggtcctgccgccagcgatcccacttgagttttatggcgaggtcataggcgatgttgacgagccgctggtctccagagagtttcatgaccagcatgaaggggattagctgcttgccaaaggaccccatccaggtgtaggtttccacatcgtaggtgagaaagagcctttctgtgcgaggatgagagccaatcgggaagaactggatctcctgccaccagttggaggaatggctgttgatgtgatggaagtagaactccctgcgacgcgccgagcattcatgcttgtgcttgtacagacggccgcagtagtcgcagcgttgcacgggttgtatctcgtgaatgagttgtacctggcttcccttgacgagaaatttcagtgggaagccgaggcctggcgattgtatctcgtgctttactatgttgtctgcatcggcctgttcatcttctgtctcgatggtggtcatgctgacgagccctcgcgggaggcaagtccagacctcggcgcggcaggggcggagctcgaggacgagagcgcgcaggctggagctgtccagggtcctgagacgctgcggactcaggttagtaggcagtgtcaggagattaacttgcatgatcttttggagggcgtgcgggaggttcagatagtacttgatctcaacgggtccgttggtggagatgtcgatggcttgcagggttccgtgtcccttgggcgctaccaccgtgcccttgtttttcattttggacggcggtggctctgttgcttcttgcatgtttagaagcggtgtcgagggcgcgcaccgggcggcaggggcggctcgggacccggcggcatggctggcagtggtacgtcggcgccgcgcgcgggtaggttctggtactgcgccctgagaagactcgcatgcgcgacgacgcggcggttgacatcctggatctgacgcctctgggtgaaagctaccggccccgtgagcttgaacctgaaagagagttcaacagaatcaatctcggtatcgttgacggcggcttgcctaaggatttcttgcacgtcaccagagttgtcctggtaggcgatctccgccatgaactgctcgatctcttcctcttgaagatctccgcggcccgctctctcgacggtggccgcgaggtcgttggagatgcgcccaatgagttgagagaatgcattcatgcccgcctcgttccagacgcggctgtagaccacggcccccacgggatctctcgcgcgcatgaccacctgggcgaggttgagctccacgtggcgggtgaagaccgcatagttgcataggcgctggaaaaggtagttgagtgtggtggcgatgtgctcggtgacgaagaaatacatgatccatcgtctcagcggcatctcgctgacatcgcccagagcttccaagcgctccatggcctcgtagaagtccacggcaaaattaaaaaactgggagtttcgcgcggacacggtcaactcctcttccagaagacggataagttcggcgatggtggtgcgcacctcgcgctcgaaagcccctgggatttcttcctcaatctcttcttcttccactaacatctcttcctcttcaggtggggctgcaggaggagggggaacgcggcgacgccggcggcgcacgggcagacggtcgatgaatctttcaatgacctctccgcggcggcggcgcatggtttcagtgacggcgcggccgttctcgcgcggtcgcagagtaaaaacaccgccgcgcatctccttaaagtggtgactgggaggttctccgtttgggagggagagggcgctgattatacattttattaattggcccgtagggactgcacgcagagatctgatcgtgtcaagatccacgggatctgaaaacctttcgacgaaagcgtctaaccagtcacagtcacaaggtaggctgagtacggcttcttgtgggcgggggtggttatgtgttcggtctgggtcttctgtttcttcttcatctcgggaaggtgagacgatgctgctggtgatgaaattaaagtaggcagttctaagacggcggatggtggcgaggagcaccaggtctttgggtccggcttgctggatacgcaggcgattggccattccccaagcattatcctgacatctagcaagatctttgtagtagtcttgcatgagccgttctacgggcacttcttcctcacccgttctgccatgcatacgtgtgagtccaaatccgcgcattggttgtaccagtgccaagtcagctacgactctttcggcgaggatggcttgctgtacttgggtaagggtggcttgaaagtcatcaaaatccacaaagcggtggtaagctcctgtattaatggtgtaagcacagttggccatgactgaccagttaactgtctggtgaccagggcgcacgagctcggtgtatttaaggcgcgaataggcgcgggtgtcaaagatgtaatcgttgcaggtgcgcaccagatactggtaccctataagaaaatgcggcggtggttggcggtagagaggccatcgttctgtagctggagcgccaggggcgaggtcttccaacataaggcggtgatagccgtagatgtacctggacatccaggtgattcctgcggcggtagtagaagcccgaggaaactcgcgtacgcggttccaaatgttgcgtagcggcatgaagtagttcattgtaggcacggtttgaccagtgaggcgcgcgcagtcattgatgctctatagacacggagaaaatgaaagcgttcagcgactcgactccgtagcctggaggaacgtgaacgggttgggtcgcggtgtaccccggttcgagacttgtactcgagccggccggagccgcggctaacgtggtattggcactcccgtctcgacccagcctacaaaaatccaggatacggaatcgagtcgttttgctggtttccgaatggcagggaagtgagtcctattttttttttttgccgctcagatgcatcccgtgctgcgacagatgcgcccccaacaacagcccccctcgcagcagcagcagcagcaatcacaaaaggctgtccctgcaactactgcaactgccgccgtgagcggtgcgggacagcccgcctatgatctggacttggaagagggcgaaggactggcacgtctaggtgcgccttcacccgagcggcatccgcgagttcaactgaaaaaagattctcgcgaggcgtatgtgccccaacagaacctatttagagacagaagcggcgaggagccggaggagatgcgagcttcccgctttaacgcgggtcgtgagctgcgtcacggtttggaccgaagacgagtgttgcgggacgaggatttcgaagttgatgaaatgacagggatcagtcctgccagggcacacgtggctgcagccaaccttgtatcggcttacgagcagacagtaaaggaagagcgtaacttccaaaagtcttttaataatcatgtgcgaaccctgattgcccgcgaagaagttacccttggtttgatgcatttgtgggatttgatggaagctatcattcagaaccctactagcaaacctctgaccgcccagctgtttctggtggtgcaacacagcagagacaatgaggctttcagagaggcgctgctgaacatcaccgaacccgaggggagatggttgtatgatcttatcaacattctacagagtatcatagtgcaggagcggagcctgggcctggccgagaaggtggctgccatcaattactcggttttgagcttgggaaaatattacgctcgcaaaatctacaagactccatacgttcccatagacaaggaggtgaagatagatgggttctacatgcgcatgacgctcaaggtcttgaccctgagcgatgatcttggggtgtatcgcaatgacagaatgcatcgcgcggttagcgccagcaggaggcgcgagttaagcgacagggaactgatgcacagtttgcaaagagctctgactggagctggaaccgagggtgagaattacttcgacatgggagctgacttgcagtggcagcctagtcgcagggctctgagcgccgcgacggcaggatgtgagcttccttacatagaagaggcggatgaaggcgaggaggaagagggcgagtacttggaagactgatggcacaacccgtgttttttgctagatggaacagcaagcaccggatcccgcaatgcgggcggcgctgcagagccagccgtccggcattaactcctcggacgattggacccaggccatgcaacgtatcatggcgttgacgactcgcaaccccgaagcctttagacagcaaccccaggccaaccgtctatcggccatcatggaagctgtagtgccttcccgctctaatcccactcatgagaaggtcctggccatcgtgaacgcgttggtggagaacaaagctattcgtccagatgaggccggactggtatacaacgctctcttagaacgcgtggctcgctacaacagtagcaatgtgcaaaccaatttggaccgtatgataacagatgtacgcgaagccgtgtctcagcgcgaaaggttccagcgtgatgccaacctgggttcgctggtggcgttaaatgctttcttgagtactcagcctgctaatgtgccgcgtggtcaacaggattatactaactttttaagtgctttgagactgatggtatcagaagtacctcagagcgaagtgtatcagtccggtcctgattacttctttcagactagcagacagggcttgcagacggtaaatctgagccaagcttttaaaaaccttaaaggtttgtggggagtgcatgccccggtaggagaaagagcaaccgtgtctagcttgttaactccgaactcccgcctattattactgttggtagctcctttcaccgacagcggtagcatcgaccgtaattcctatttgggttacctactaaacctgtatcgcgaagccatagggcaaagtcaggtggacgagcagacctatcaagaaattacccaagtcagtcgcgctttgggacaggaagacactggcagtttggaagccactctgaacttcttgcttaccaatcggtctcaaaagatccctcctcaatatgctcttactgcggaggaggagaggatccttagatatgtgcagcagagcgtgggattgtttctgatgcaagagggggcaactccgactgcagcactggacatgacagcgcgaaatatggagcccagcatgtatgccagtaaccgacctttcattaacaaactgctggactacttgcacagagctgccgctatgaactctgattatttcaccaatgccatcttaaacccgcactggctgcccccacctggtttctacacgggcgaatatgacatgcccgaccctaatgacggatttctgtgggacgacgtggacagcgatgttttttcacctctttctgatcatcgcacgtggaaaaaggaaggcggcgatagaatgcattcttctgcatcgctgtccggggtcatgggtgctaccgcggctgagcccgagtctgcaagtccttttcctagtctacccttttctctacacagtgtacgtagcagcgaagtgggtagaataagtcgcccgagtttaatgggcgaagaggagtatctaaacgattccttgctcagaccggcaagagaaaaaaatttcccaaacaatggaatagaaagtttggtggataaaatgagtagatggaagacttatgctcaggatcacagagacgagcctgggatcatggggattacaagtagagcgagccgtagacgccagcgccatgacagacagaggggtcttgtgtgggacgatgaggattcggccgatgatagcagcgtgctggacttgggtgggagaggaaggggcaacccgtttgctcatttgcgccctcgcttgggtggtatgttgtaaaaaaaaataaaaaaaaaactcaccaaggccatggcgacgagcgtacgttcgttcttctttattatctgtgtctagtataatgaggcgagtcgtgctaggcggagcggtggtgtatccggagggtcctcctccttcgtacgagagcgtgatgcagcagcagcaggcgacggcggtgatgcaatccccactggaggctccctttgtgcctccgcgatacctggcacctacggagggcagaaacagcattcgttattcggaactggcacctcagtacgataccaccaggttgtatctggtggacaacaagtcggcggacattgcttctctgaactatcagaatgaccacagcaacttcttgaccacggtggtgcaaaacaatgactttacccctacggaagccagcacccagaccattaactttgatgaacgatcgcggtggggcggtcagctaaagaccatcatgcatactaacatgccaaacgtgaacgagtatatgtttagtaacaagttcaaagcgcgtgtgatggtgtccagaaaacctcccgacggtgctgcagttggggatacttatgatcacaagcaggatattttgaaatatgagtggttcgagtttactttgccagaaggcaacttttcagttactatgactattgatttgatgaacaatgccatcatagataattacttgaaagtgggtagacagaatggagtgcttgaaagtgacattggtgttaagttcgacaccaggaacttcaagctgggatgggatcccgaaaccaagttgatcatgcctggagtgtatacgtatgaagccttccatcctgacattgtcttactgcctggctgcggagtggattttaccgagagtcgtttgagcaaccttcttggtatcagaaaaaaacagccatttcaagagggttttaagattttgtatgaagatttagaaggtggtaatattccggccctcttggatgtagatgcctatgagaacagtaagaaagaacaaaaagccaaaatagaagctgctacagctgctgcagaagctaaggcaaacatagttgccagcgactctacaagggttgctaacgctggagaggtcagaggagacaattttgcgccaacacctgttccgactgcagaatcattattggccgatgtgtctgaaggaacggacgtgaaactcactattcaacctgtagaaaaagatagtaagaatagaagctataatgtgttggaagacaaaatcaacacagcctatcgcagttggtatctttcgtacaattatggcgatcccgaaaaaggagtgcgttcctggacattgctcaccacctcagatgtcacctgcggagcagagcaggtctactggtcgcttccagacatgatgaaggatcctgtcactttccgctccactagacaagtcagtaactaccctgtggtgggtgcagagcttatgcccgtcttctcaaagagcttctacaacgaacaagctgtgtactcccagcagctccgccagtccacctcgcttacgcacgtcttcaaccgctttcctgagaaccagattttaatccgtccgccggcgcccaccattaccaccgtcagtgaaaacgttcctgctctcacagatcacgggaccctgccgttgcgcagcagtatccggggagtccaacgtgtgaccgttactgacgccagacgccgcacctgtccctacgtgtacaaggcactgggcatagtcgcaccgcgcgtcctttcaagccgcactttctaaaaaaaaaaaaaatgtccattcttatctcgcccagtaataacaccggttggggtctgcgcgctccaagcaagatgtacggaggcgcacgcaaacgttctacccaacatcctgtccgtgttcgcggacattttcgcgctccatggggcgccctcaagggccgcactcgcgttcgaaccaccgtcgatgatgtaatcgatcaggtggttgccgacgcccgtaattatactcctactgcgcctacatctactgtggatgcagttattgacagtgtagtggctgacgctcgcaactatgctcgacgtaagagccggcgaaggcgcattgccagacgccaccgagctaccactgccatgcgagccgcaagagctctgctacgaagagctagacgcgtggggcgaagagccatgcttagggcggccagacgtgcagcttcgggcgccagcgccggcaggtcccgcaggcaagcagccgctgtcgcagcggcgactattgccgacatggcccaatcgcgaagaggcaatgtatactgggtgcgtgacgctgccaccggtcaacgtgtacccgtgcgcacccgtccccctcgcacttagaagatactgagcagtctccgatgttgtgtcccagcggcgaggatgtccaagcgcaaatacaaggaagaaatgctgcaggttatcgcacctgaagtctacggccaaccgttgaaggatgaaaaaaaaccccgcaaaatcaagcgggttaaaaaggacaaaaaagaagaggaagatggcgatgatgggctggcggagtttgtgcgcgagtttgccccacggcgacgcgtgcaatggcgtgggcgcaaagttcgacatgtgttgagacctggaacttcggtggtctttacacccggcgagcgttcaagcgctacttttaagcgttcctatgatgaggtgtacggggatgatgatattcttgagcaggcggctgaccgattaggcgagtttgcttatggcaagcgtagtagaataacttccaaggatgagacagtgtcgatacccttggatcatggaaatcccacccctagtcttaaaccggtcactttgcagcaagtgttacccgtaactccgcgaacaggtgttaaacgcgaaggtgaagatttgtatcccactatgcaactgatggtacccaaacgccagaagttggaggacgttttggagaaagtaaaagtggatccagatattcaacctgaggttaaagtgagacccattaagcaggtagcgcctggtctgggggtacaaactgtagacattaagattcccactgaaagtatggaagtgcaaactgaacccgcaaagcctactgccacctccactgaagtgcaaacggatccatggatgcccatgcctattacaactgacgccgccggtcccactcgaagatcccgacgaaagtacggtccagcaagtctgttgatgcccaattatgttgtacacccatctattattcctactcctggttaccgaggcactcgctactatcgcagccgaaacagtacctcccgccgtcgccgcaagacacctgcaaatcgcagtcgtcgccgtagacgcacaagcaaaccgactcccggcgccctggtgcggcaagtgtaccgcaatggtagtgcggaacctttgacactgccgcgtgcgcgttaccatccgagtatcatcacttaatcaatgttgccgctgcctccttgcagatatggccctcacttgtcgccttcgcgttcccatcactggttaccgaggaagaaactcgcgccgtagaagagggatgttgggacgcggaatgcgacgctacaggcgacggcgtgctatccgcaagcaattgcggggtggttttttaccagccttaattccaattatcgctgctgcaattggcgcgataccaggcatagcttccgtggcggttcaggcctcgcaacgacattgacattggaaaaaaacgtataaataaaaaaaaaaaaatacaatggactctgacactcctggtcctgtgactatgttttcttagagatggaagacatcaatttttcatccttggctccgcgacacggcacgaagccgtacatgggcacctggagcgacatcggcacgagccaactgaacgggggcgccttcaattggagcagtatctggagcgggcttaaaaattttggctcaaccataaaaacatacgggaacaaagcttggaacagcagtacaggacaggcgcttagaaataaacttaaagaccagaacttccaacaaaaagtagtcgatgggatagcttccggcatcaatggagtggtagatttggctaaccaggctgtgcagaaaaagataaacagtcgtttggacccgccgccagcaaccccaggtgaaatgcaagtggaggaagaaattcctccgccagaaaaacgaggcgacaagcgtccgcgtcccgatttggaagagacgctggtgacgcgcgtagatgaaccgccttcttatgaggaagcaacgaagcttggaatgcccaccactagaccgatagccccaatggccaccggggtgatgaaaccttctcagttgcatcgacccgtcaccttggatttgccccctccccctgctgctactgctgtacccgcttctaagcctgtcgctgccccgaaaccagtcgccgtagccaggtcacgtcccgggggcgctcctcgtccaaatgcgcactggcaaaatactctgaacagcatcgtgggtctaggcgtgcaaagtgtaaaacgccgtcgctgcttttaattaaatatggagtagcgcttaacttgcctatctgtgtatatgtgtcattacacgccgtcacagcagcagaggaaaaaaggaagaggtcgtgcgtcgacgctgagttactttcaagatggccaccccatcgatgctgccccaatgggcatacatgcacatcgccggacaggatgcttcggagtacctgagtccgggtctggtgcagttcgcccgcgccacagacacctacttcaatctgggaaataagtttagaaatcccaccgtagcgccgacccacgatgtgaccaccgaccgtagccagcggctcatgttgcgcttcgtgcccgttgaccgggaggacaatacatactcttacaaagtgcggtacaccctggccgtgggcgacaacagagtgctggatatggccagcacgttctttgacattaggggtgtgttggacagaggtcccagtttcaaaccctattctggtacggcttacaactccctggctcctaaaggcgctccaaatacatctcagtggattgcagaaggtgtaaaaaatacaactggtgaggaacacgtaacagaagaggaaaccaatactactacttacacttttggcaatgctcctgtaaaagctgaagctgaaattacaaaagaaggactcccagtaggtttggaagtttcagatgaagaaagtaaaccgatttatgctgataaaacatatcagccagaacctcagctgggagatgaaacttggactgaccttgatggaaaaaccgaaaagtatggaggcagggctctcaaacccgatactaagatgaaaccatgctacgggtcctttgccaaacctactaatgtgaaaggcggtcaggcaaaacaaaaaacaacggagcagccaaatcagaaagtcgaatatgatatcgacatggagttttttgatgcggcatcgcagaaaacaaacttaagtcctaaaattgtcatgtatgcagaaaatgtaaatttggaaactccagacactcatgtagtgtacaaacctggaacagaagacacaagttccgaagctaatttgggacaacaatctatgcccaacagacccaactacattggcttcagagataactttattggacttatgtactataacagtactggtaacatgggggtgctggctggtcaagcgtctcagttaaatgcagtggttgacttgcaggacagaaacacagaactttcttaccaactcttgcttgactctctgggcgacagaaccagatactttagcatgtggaatcaggctgtggacagttatgatcctgatgtacgtgttattgaaaatcatggtgtggaagatgaacttcccaactactgttttccactggacggcataggtgttccaacaaccagttacaaatcaatagttccaaatggagacaatgcgcctaattggaaggaacctgaagtaaatggaacaagtgagatcggacagggtaatttgtttgccatggaaattaaccttcaagccaatctatggcgaagtttcctttattccaatgtggctctatatctcccagactcgtacaaatacaccccgtccaatgtcactcttccagaaaacaaaaacacctacgactacatgaacgggcgggtggtgccgccatctctagtagacacctatgtgaacattggtgccaggtggtctctggatgccatggacaatgtcaacccattcaaccaccaccgtaacgctggcttgcgttaccgatccatgcttctgggtaacggacgttatgtgcctttccacatacaagtgcctcaaaaattcttcgctgttaaaaacctgctgcttctcccaggctcctacacttatgagtggaactttaggaaggatgtgaacatggttctacagagttccctcggtaacgacctgcgggtagatggcgccagcatcagtttcacgagcatcaacctctatgctacttttttccccatggctcacaacaccgcttccacccttgaagccatgctgcggaatgacaccaatgatcagtcattcaacgactacctatctgcagctaacatgctctaccccattcctgccaatgcaaccaatattcccatttccattccttctcgcaactgggcggctttcagaggctggtcatttaccagactgaaaaccaaagaaactccctctttggggtctggatttgacccctactttgtctattctggttctattccctacctggatggtaccttctacctgaaccacacttttaagaaggtttccatcatgtttgactcttcagtgagctggcctggaaatgacaggttactatctcctaacgaatttgaaataaagcgcactgtggatggcgaaggctacaacgtagcccaatgcaacatgaccaaagactggttcttggtacagatgctcgccaactacaacatcggctatcagggcttctacattccagaaggatacaaagatcgcatgtattcatttttcagaaacttccagcccatgagcaggcaggtggttgatgaggtcaattacaaagacttcaaggccgtcgccataccctaccaacacaacaactctggctttgtgggttacatggctccgaccatgcgccaaggtcaaccctatcccgctaactatccctatccactcattggaacaactgccgtaaatagtgttacgcagaaaaagttcttgtgtgacagaaccatgtggcgcataccgttctcgagcaacttcatgtctatgggggcccttacagacttgggacagaatatgctctatgccaactcagctcatgctctggacatgacctttgaggtggatcccatggatgagcccaccctgctttatcttctcttcgaagttttcgacgtggtcagagtgcatcagccacaccgcggcatcatcgaggcagtctacctgcgtacaccgttctcggccggtaacgctaccacgtaagaagcttcttgcttcttgcaaatagcagctgcaaccatggcctgcggatcccaaaacggctccagcgagcaagagctcagagccattgtccaagacctgggttgcggaccctattttttgggaacctacgataagcgcttcccggggttcatggcccccgataagctcgcctgtgccattgtaaatacggccggacgtgagacggggggagagcactggttggctttcggttggaacccacgttctaacacctgctacctttttgatccttttggattctcggatgatcgtctcaaacagatttaccagtttgaatatgagggtctcctgcgccgcagcgctcttgctaccaaggaccgctgtattacgctggaaaaatctacccagaccgtgcagggtccccgttctgccgcctgcggacttttctgctgcatgttccttcacgcctttgtgcactggcctgaccgtcccatggacggaaaccccaccatgaaattgctaactggagtgccaaacaacatgcttcattctcctaaagtccagcccaccctgtgtgacaatcaaaaagcactctaccattttcttaatacccattcgccttattttcgctcccatcgtacacacatcgaaagggccactgcgttcgaccgtatggatgttcaataatgactcatgtaaacaacgtgttcaataaacatcactttatttttttacatgtatcaaggctctgcattacttatttatttacaagtcgaatgggttctgacgagaatcagaatgacccgcaggcagtgatacgttgcggaactgatacttgggttgccacttgaattcgggaatcaccaacttgggaaccggtatatcgggcaggatgtcactccacagctttctggtcagctgcaaagctccaagcaggtcaggagccgaaatcttgaaatcacaattaggaccagtgctttgagcgcgagagttgcggtacaccggattgcagcactgaaacaccatcagcgacggatgtctcacgcttgccagcacggtgggatctgcaatcatgcccacatccagatcttcagcattggcaatgctgaacggggtcatcttgcaggtctgcctacccatggcgggcacccaattaggcttgtggttgcaatcgcagtgcagggggatcagtatcatcttggcctgatcctgtctgattcctggatacacggctctcatgaaagcatcatattgcttgaaagcctgctgggctttactaccctcggtataaaacatcccgcaggacctgctcgaaaactggttagctgcacagccggcatcattcacacagcagcgggcgtcattgttagctatttgcaccacacttctgccccagcggttttgggtgattttggttcgctcgggattctcctttaaggctcgttgtccgttctcgctggccacatccatctcgataatctgctccttctgaatcataatattgccatgcaggcacttcagcttgccctcataatcattgcagccatgaggccacaacgcacagcctgtacattcccaattatggtgggcgatctgagaaaaagaatgtatcattccctgcagaaatcttcccatcatcgtgctcagtgtcttgtgactagtgaaagttaactggatgcctcggtgctcctcgtttacgtactggtgacagatgcgcttgtattgttcgtgttgctcaggcattagtttaaaagaggttctaagttcgttatccagcctgtacttctccatcagcagacacatcacttccatgcctttctcccaagcagacaccaggggcaagctaatcggattcttaacagtgcaggcagcagctcctttagccagagggtcatctttagcgatcttctcaatgcttcttttgccatccttctcaacgatgcgcacgggcgggtagctgaaacccactgctacaagttgcgcctcttctctttcttcttcgctgtcttgactgatgtcttgcatggggatatgtttggtcttccttggcttctttttggggggtatcggaggaggaggactgtcgctccgttccggagacagggaggattgtgacgtttcgctcaccattaccaactgactgtcggtagaagaacctgaccccacacggcgacaggtgtttctcttcgggggcagaggtggaggcgattgcgaagggctgcggtccgacctggaaggcggatgactggcagaaccccttccgcgttcgggggtgtgctccctgtggcggtcgcttaactgatttccttcgcggctggccattgtgttctcctaggcagagaaacaacagacatggaaactcagccattgctgtcaacatcgccacgagtgccatcacatctcgtcctcagcgacgaggaaaaggagcagagcttaagcattccaccgcccagtcctgccaccacctctaccctagaagataaggaggtcgacgcatctcatgacatgcagaataaaaaagcgaaagagtctgagacagacatcgagcaagacccgggctatgtgacaccggtggaacacgaggaagagttgaaacgctttctagagagagaggatgaaaactgcccaaaacaacgagcagataactatcaccaagatgctggaaatagggatcagaacaccgactacctcatagggcttgacggggaagacgcgctccttaaacatctagcaagacagtcgctcatagtcaaggatgcattattggacagaactgaagtgcccatcagtgtggaagagctcagccgcgcctacgagcttaacctcttttcacctcgtactccccccaaacgtcagccaaacggcacctgcgagccaaatcctcgcttaaacttttatccagcttttgctgtgccagaagtactggctacctatcacatcttttttaaaaatcaaaaaattccagtctcctgccgcgctaatcgcacccgcgccgatgccctactcaatctgggacctggttcacgcttacctgatatagcttccttggaagaggttccaaagatcttcgagggtctgggcaataatgagactcgggccgcaaatgctctgcaaaagggagaaaatggcatggatgagcatcacagcgttctggtggaattggaaggcgataatgccagactcgcagtactcaagcgaagcatcgaggtcacacacttcgcatatcccgctgtcaacctgccccctaaagtcatgacggcggtcatggaccagttactcattaagcgcgcaagtcccctttcagaagacatgcatgacccagatgcctgtgatgagggtaaaccagtggtcagtgatgagcagctaacccgatggctgggcaccgactctcccagggatttggaagagcgtcgcaagcttatgatggccgtggtgctggttaccgtagaactagagtgtctccgacgtttctttaccgattcagaaaccttgcgcaaactcgaagagaatctgcactacacttttagacacggctttgtgcggcaggcatgcaagatatctaacgtggaactcaccaacctggtttcctacatgggtattctgcatgagaatcgcctaggacaaagcgtgctgcacagcaccctgaagggggaagcccgccgtgattacatccgcgattgtgtctatctgtacctgtgccacacgtggcaaaccggcatgggtgtatggcagcaatgtttagaagaacagaacttgaaagagcttgacaagctcttacagaaatctcttaaggttctgtggacagggttcgacgagcgcaccgtcgcttccgacctggcagacctcatcttcccagagcgtctcagggttactttgcgaaacggattgcctgactttatgagccagagcatgcttaacaattttcgctctttcatcctggaacgctccggtatcctgcccgccacctgctgcgcactgccctccgactttgtgcctctcacctaccgcgagtgccccccgccgctatggagtcactgctacctgttccgtctggccaactatctctcctaccactcggatgtgatcgaggatgtgagcggagacggcttgctggagtgtcactgccgctgcaatctgtgcacgccccaccggtccctagcttgcaacccccagttgatgagcgaaacccagataataggcacctttgaattgcaaggccccagcagccaaggcgatgggtcttctcctgggcaaagtttaaaactgaccccgggactgtggacctccgcctacttgcgcaagtttgctccggaagattaccacccctatgaaatcaagttctatgaggaccaatcacagcctccaaaggccgaactttcggcctgcgtcatcacccagggggcaattctggcccaattgcaagccatccaaaaatcccgccaagaatttctactgaaaaagggtaagggggtctaccttgacccccagaccggcgaggaactcaacacaaggttccctcaggatgtcccaacgacgagaaaacaagaagttgaaggtgcagccgccgcccccagaagatatggaggaagattgggacagtcaggcagaggaggcggaggaggacagtctggaggacagtctggaggaagacagtttggaggaggaaaacgaggaggcagaggaggtggaagaagtaaccgccgacaaacagttatcctcggctgcggagacaagcaacagcgctaccatctccgctccgagtcgaggaacccggcggcgtcccagcagtagatgggacgagaccggacgcttcccgaacccaaccagcgcttccaagaccggtaagaaggatcggcagggatacaagtcctggcgggggcataagaatgccatcatctcctgcttgcatgagtgcgggggcaacatatccttcacgcggcgctacttgctattccaccatggggtgaactttccgcgcaatgttttgcattactaccgtcacctccacagcccctactatagccagcaaatcccggcagtctcgacagataaagacagcggcggcgacctccaacagaaaaccagcagcggcagttagaaaatacacaacaagtgcagcaacaggaggattaaagattacagccaacgagccagcgcaaacccgagagttaagaaatcggatctttccaaccctgtatgccatcttccagcagagtcggggtcaagagcaggaactgaaaataaaaaaccgatctctgcgttcgctcaccagaagttgtttgtatcacaagagcgaagatcaacttcagcgcactctcgaggacgccgaggctctcttcaacaagtactgcgcgctgactcttaaagagtaggcagcgaccgcgcttattcaaaaaaggcgggaattacatcatcctcgacatgagtaaagaaattcccacgccttacatgtggagttatcaaccccaaatgggattggcggcaggcgcctcccaggactactccacccgcatgaattggctcagcgccgggccttctatgatttctcgagttaatgatatacgcgcctaccgaaaccaaatacttttggaacagtcagctcttaccaccacgccccgccaacaccttaatcccagaaattggcccgccgccctagtgtaccaggaaagtcccgctcccaccactgtattacttcctcgagacgcccaggccgaagtccaaatgactaatgcaggtgcgcagttagctggcggctccaccctatgtcgtcacaggcctcggcataatataaaacgcctgatgatcagaggccgaggtatccagctcaacgacgagtcggtgagctctccgcttggtctacgaccagacggaatctttcagattgccggctgcgggagatcttccttcacccctcgtcaggctgttctgactttggaaagttcgtcttcgcaaccccgctcgggcggaatcgggaccgttcaatttgtggaggagtttactccctctgtctacttcaaccccttctccggatctcctgggcattacccggacgagttcataccgaacttcgacgcgattagcgagtcagtggacggctacgattgatgtctggtgacgcggctgagctatctcggctgcgacatctagaccactgccgccgctttcgctgctttgcccgggaactcattgagttcatctacttcgaactccccaaggatcaccctcaaggtccggcccacggagtgcggatttctatcgaaggcaaaatagactctcgcctgcaacgaattttctcccagcggcccgtgctgatcgagcgagaccagggaaacaccacggtttccatctactgcatttgtaatcaccccggattgcatgaaagcctttgctgtcttatgtgtactgagtttaataaaaactgaattaagactctcctacggactgccgcttcttcaacccggattttacaaccagaagaacgaaacttttcctgtcgtccaggactctgttaacttcacctttcctactcacaaactagaagctcaacgactacaccgcttttccagaagcattttccctactaatactactttcaaaaccggaggtgagctccaaggtcttcctacagaaaacccttgggtggaagcgggccttgtagtgctaggaattcttgcgggtgggcttgtgattattctttgctacctatacacaccttgcttcactttcttagtggtgttgtggtattggtttaaaaaatggggcccatactagtcttgcttgttttactttcgcttttggaaccgggttctgccaattacgatccatgtctagacttcgacccagaaaactgcacacttacttttgcacccgacacaagccgcatctgtggagttcatcgcctctcttacgaacttggcccccaacgacaaaaatttacctgcatggtgggaatcaaccccatagttatcacccagcaaagtggagatactaagggttgcattcactgctcctgcgattccatcgagtgcacctacaccctgctgaagaccctatgcggcctaagagacctgctaccaatgaattaaaaaatgattaataaaaaatcacttacttgaaatcagcaataaggtctctgttgaaattttctcccagcagcacctcacttccctcttcccaactctggtattctaaaccccgttcagcggcatactttctccatactttaaaggggatgtcaaattttagctcctctcctgtacccacaatcttcatgtctttcttcccagatgaccaagagagtccggctcagtgactccttcaaccctgtctacccctatgaagatgaaagcacctcccaacacccctttataaacccagggtttatttccccaaatggcttcacacaaagcccaaacggagttcttactttaaaatgtttaaccccactaacaaccacaggcggatctctacagctaaaagtgggagggggacttacagtggatgacaccaacggttttttgaaagaaaacataagtgccaccacaccactcgttaagactggtcactctataggtttaccactaggagccggattgggaacgaatgaaaataaactttgtatcaaattaggacaaggacttacattcaattcaaacaacatttgcattgatgacaatattaacaccttatggacaggagtcaaccccaccgaagccaactgtcaaatcatgaactccagtgaatctaatgattgcaaattaattctaacactagttaaaactggagcactagtcactgcatttgtttatgttataggagtatctaacaattttaatatgctaactacacacagaaatataaattttactgcagagctgtttttcgattctactggtaatttactaactagactctcatccctcaaaactccacttaatcataaatcaggacaaaacatggctactggtgccattactaatgctaaaggtttcatgcccagcacgactgcctatcctttcaatgataattctagagaaaaagaaaactacatttacggaacttgttactacacagctagtgatcgcactgcttttcccattgacatatctgtcatgcttaaccgaagagcaataaatgacgagacatcatattgtattcgtataacttggtcctggaacacaggagatgccccagaggtgcaaacctctgctacaaccctagtcacctccccatttaccttttactacatcagagaagacgactgacaaataaagtttgcgatcgccaggcccaccatgaagaaaagtggtgttcttttcctcttgggcatcatcttgctggttctgattggagtgcaaggaaccccagtagtgagaaagggtcgctgttcctgcatcagcaccaaccaagggactatccacctacaatccttgaaagaccttaaacaatttgccccaagcccttcctgcgagaaaattgaaatcattgctacactgaagaatggagttcaaacatgtctaaacccagattcagcagatgtgaaggaactgattaaaaagtgggagaaacaggtcagccaaaagaaaaagcaaaagaatgggaaaaaacatcaaaaaaagaaagttctgaaagttcgaaaatctcaacgttctcgtcaaaagaagactacaggaagcggagagggcagaggaagtctgctaacatgcggtgacgtcgaggagaatcctggacctgcccaatctctcgcacttagtctgctcattctcgtgcttgctttcgggattccaagaactcagggaagcgacggcggtgcccaagattgctgtctgaaatatagtcagagaaaaatccctgctaaagtggttcggagttatcgcaaacaagagcccagtttggggtgttcaattcccgcaattctctttttaccacggaaacggtcccaagctgaactgtgcgctgatcctaaagaactgtgggtccaacagctcatgcaacaccttgataaaaccccttctccccaaaagcctgctcaagggggaagcggagctactaacttcagcctgctgaagcaggctggagacgtggaggagaaccctggacctgccttgacctttgctttactggtggccctcctggtgctcagctgcaagtcaagctgctctgtgggctgtgatctgcctcaaacccacagcctgggtagcaggaggaccttgatgctcctggcacagatgaggagaatctctcttttctcctgcttgaaggacagacatgactttggatttccccaggaggagtttggcaaccagttccaaaaggctgaaaccatccctgtcctccatgagatgatccagcagatcttcaatctcttcagcacaaaggactcatctgctgcttgggatgagaccctcctagacaaattctacactgaactctaccagcagctgaatgacctggaagcctgtgtgatacagggggtgggggtgacagagactcccctgatgaaggaggactccattctggctgtgaggaaatacttccaaagaatcactctctatctgaaagagaagaaatacagcccttgtgcctgggaggttgtcagagcagaaatcatgagatctttttctttgtcaacaaacttgcaagaaagtttaagaagtaaggaaggaagcggacagtgtactaattatgctctcttgaaattggctggagatgttgagagcaaccctggacctgactggacctggcgcatcctgttcttggtggcagctgctacgggagctcattccaactgggtgaatgtaataagtgatttgaaaaaaattgaagatcttattcaatctatgcatattgatgctactttatatacggaaagtgatgttcaccccagttgcaaagtaacagcaatgaagtgctttctcttggagttacaagttatttcacttgagtccggagatgcaagtattcatgatacagtagaaaatctgatcatcctagcaaacaacagtttgtcttctaatgggaatgtaacagaatctggatgcaaagaatgtgaggaactggaggaaaaaaatattaaagaatttttgcagagttttgtacatattgtccaaatgttcatcaacacttctggaagcggagtgaaacagactttgaattttgaccttctcaagttggcgggagacgtggagtccaaccctggacctatgtgtcaccagcagttggtcatctcttggttttccctggtttttctggcatctcccctcgtggccatatgggaactgaagaaagatgtttatgtcgtagaattggattggtatccggatgcccctggagaaatggtggtcctcacctgtgacacccctgaagaagatggtatcacctggaccttggaccagagcagtgaggtcttaggctctggcaaaaccctgaccatccaagtcaaagagtttggagatgctggccagtacacctgtcacaaaggaggcgaggttctaagccattcgctcctgctgcttcacaaaaaggaagatggaatttggtccactgatattttaaaggaccagaaagaacccaaaaataagacctttctaagatgcgaggccaagaattattctggacgtttcacctgctggtggctgacgacaatcagtactgatttgacattcagtgtcaaaagcagcagaggctcttctgacccccaaggggtgacgtgcggagctgctacactctctgcagagagagtcagaggggacaacaaggagtatgagtactcagtggagtgccaggaggacagtgcctgcccagctgctgaggagagtctgcccattgaggtcatggtggatgccgttcacaagctcaagtatgaaaactacaccagcagcttcttcatcagggacatcatcaaacctgacccacccaagaacttgcagctgaagccattaaagaattctcggcaggtggaggtcagctgggagtaccctgacacctggagtactccacattcctacttctccctgacattctgcgttcaggtccagggcaagagcaagagagaaaagaaagatagagtcttcacggacaagacctcagccacggtcatctgccgcaaaaatgccagcattagcgtgcgggcccaggaccgctactatagctcatcttggagcgaatgggcatctgtgccctgcagtggagggggcggcagcgggggaggcggcagcggcggcgggggatcgagaaacctccccgtggccactccagacccaggaatgttcccatgccttcaccactcccaaaacctgctgagggccgtcagcaacatgctccagaaggccagacaaactctagaattttacccttgcacttctgaagagattgatcatgaagatatcacaaaagataaaaccagcacagtggaggcctgtttaccattggaattaaccaagaatgagagttgcctaaattccagagagacctctttcataactaatgggagttgcctggcctccagaaagacctcttttatgatggccctgtgccttagtagtatttatgaagacttgaagatgtaccaggtggagttcaagaccatgaatgcaaagcttctgatggatcctaagaggcagatctttctagatcaaaacatgctggcagttattgatgagctgatgcaggccctgaatttcaacagtgagactgtgccacaaaaatcctcccttgaagaaccggatttttataaaactaaaatcaagctctgcatacttcttcatgctttcagaattcgggcagtgactattgatagagtgatgagctatctgaatgcttcctaagctagcttgactgactgagatacagcgtaccttcagctcacagacatgataagatacattgatgagtttggacaaaccacaactagaatgcagtgaaaaaaatgctttatttgtgaaatttgtgatgctattgctttatttgtaaccattataagctgcaataaacaagttaacaacaacaattgcattcattttatgtttcaggttcagggggaggtgtgggaggttttttaaagcaagtaaaacctctacaaatgtggtagtcgtcagctatcctgcaggaacttgtttatttgaaaatcaattcacaaaatccgagtagttattttgcctcccccttcccatttaacagaatacaccaatctctccccacgcacagctttaaacatttggataccattagatatagacatggttttagattccacattccaaacagtttcagagcgagccaatctggggtcagtgatagataaaaatccatcgggatagtcttttaaagcgctttcacagtccaactgctgcggatgcgactccggagtctggatcacggtcatctggaagaagaacgatgggaatcataatccgaaaacggtatcggacgattgtgtctcatcaaacccacaagcagccgctgtctgcgtcgctccgtgcgactgctgtttatgggatcagggtccacagtgtcctgaagcatgattttaatagcccttaacatcaactttctggtgcgatgcgcgcagcaacgcattctgatttcactcaaatctttgcagtaggtacaacacattattacaatattgtttaataaaccataattaaaagcgctccagccaaaactcatatctgatataatcgcccctgcatgaccatcataccaaagtttaatataaattaaatgacgttccctcaaaaacacactacccacatacatgatctcttttggcatgtgcatattaacaatctgtctgtaccatggacaacgttggttaatcatgcaacccaatataaccttccggaaccacactgccaacaccgctcccccagccatgcattgaagtgaaccctgctgattacaatgacaatgaagaacccaattctctcgaccgtgaatcacttgagaatgaaaaatatctatagtggcacaacatagacataaatgcatgcatcttctcataatttttaactcctcaggatttagaaacatatcccagggaataggaagctcttgcagaacagtaaagctggcagaacaaggaagaccacgaacacaacttacactatgcatagtcatagtatcacaatctggcaacagcgggtggtcttcagtcatagaagctcgggtttcattttcctcacaacgtggtaactgggctctggtgtaagggtgatgtctggcgcatgatgtcgagcgtgcgcgcaaccttgtcataatggagttgcttcctgacattctcgtattttgtatagcaaaacgcggccctggcagaacacactcttcttcgccttctatcctgccgcttagcgtgttccgtgtgatagttcaagtacaaccacactcttaagttggtcaaaagaatgctggcttcagttgtaatcaaaactccatcgcatctaatcgttctgaggaaatcatccaagcaatgcaactggattgtgtttcaagcaggagaggagagggaagagacggaagaaccatgttaatttttattccaaacgatctcgcagtacttcaaattgtagatcgcgcagatggcatctctcgcccccactgtgttggtgaaaaagcacagctagatcaaaagaaatgcgattttcaaggtgctcaacggtggcttccagcaaagcctccacgcgcacatccaagaacaaaagaataccaaaagaaggagcattttctaactcctcaatcatcatattacattcctgcaccattcccagataattttcagctttccagccttgaattattcgtgtcagttcttgtggtaaatccaatccacacattacaaacaggtcccggagggcgccctccaccaccattcttaaacacaccctcataatgacaaaatatcttgctcctgtgtcacctgtagcgaattgagaatggcaacatcaattgacatgcccttggctctaagttcttctttaagttctagttgtaaaaactctctcatattatcaccaaactgcttagccagaagccccccgggaacaagagcaggggacgctacagtgcagtacaagcgcagacctccccaattggctccagcaaaaacaagattggaataagcatattgggaaccgccagtaatatcatcgaagttgctggaaatataatcaggcagagtttcttgtaaaaattgaataaaagaaaaatttgccaaaaaaacattcaaaacctctgggatgcaaatgcaataggttaccgcgctgcgctccaacattgttagttttgaattagtctgcaaaaataaaaaaaaaaacaagcgtcatatcatagtagcctgacgaacagatggataaatcagtctttccatcacaagacaagccacagggtctccagctcgaccctcgtaaaacctgtcatcatgattaaacaacagcaccgaaagttcctcgcggtgaccagcatgaataattcttgatgaagcatacaatccagacatgttagcatcagttaacgagaaaaaacagccaacatagcctttgggtataattatgcttaatcgtaagtatagcaaagccacccctcgcggatacaaagtaaaaggcacaggagaataaaaaatataattatttctctgctgctgttcaggcaacgtcgcccccggtccctctaaatacacatacaaagcctcatcagccatggcttaccagacaaagtacagcgggcacacaaagcacaagctctaaagtgactctccaacctctccacaatatatatatacacaagccctaaactgacgtaatgggagtaaagtgtaaaaaatcccgccaaacccaacacacaccccgaaactgcgtcaccagggaaaagtacagtttcacttccgcaatcccaacaggcgtaacttcctctttctcacggtacgtgatatcccactaacttgcaacgtcattttcccacggtcgcaccgccccttttagccgttaaccccacagccaatcaccacacgatccacactttttaaaatcacctcatttacatattggcaccattccatctataaggtatattatatagataga

SEQ ID NO: 115 - protein, 518 aa, Artificial Sequence
  Mature human IL-12 p70 single chain protein with a (Gly4Ser)3 linker joining the IL12p40 protein without its signal sequence N-terminal to the IL12p35 protein without its signal sequence (mature IL12p40LinkerIL12p35)
IWELKKDVYVVELDWYPDAPGEMVVLTCDTPEEDGITWTLDQSSEVLGSGKTLTIQVKEFGDAGQYTCHKGGEVLSHSLLLLHKKEDGIWSTDILKDQKEPKNKTFLRCEAKNYSGRFTCWWLTTISTDLTFSVKSSRGSSDPQGVTCGAATLSAERVRGDNKEYEYSVECQEDSACPAAEESLPIEVMVDAVHKLKYENYTSSFFIRDIIKPDPPKNLQLKPLKNSRQVEVSWEYPDTWSTPHSYFSLTFCVQVQGKSKREKKDRVFTDKTSATVICRKNASISVRAQDRYYSSSWSEWASVPCSGGGGSGGGGSGGGGSRNLPVATPDPGMFPCLHHSQNLLRAVSNMLQKARQTLEFYPCTSEEIDHEDITKDKTSTVEACLPLELTKNESCLNSRETSFITNGSCLASRKTSFMMALCLSSIYEDLKMYQVEFKTMNAKLLMDPKRQIFLDQNMLAVIDELMQALNFNSETVPQKSSLEEPDFYKTKIKLCILLHAFRIRAVTIDRVMSYLNAS

SEQ ID NO: 116 - DNA, 1707 bp, Artificial Sequence
  DNA sequence for the protein coding sequence of the NG-701 transgene cassette, including the stop codon
atgtgtccagcgcgcagcctcctccttgtggctaccctggtcctcctggaccacctcagtttggccagaaacctccccgtggccactccagacccaggaatgttcccatgccttcaccactcccaaaacctgctgagggccgtcagcaacatgctccagaaggccagacaaactctagaattttacccttgcacttctgaagagattgatcatgaagatatcacaaaagataaaaccagcacagtggaggcctgtttaccattggaattaaccaagaatgagagttgcctaaattccagagagacctctttcataactaatgggagttgcctggcctccagaaagacctcttttatgatggccctgtgccttagtagtatttatgaagacttgaagatgtaccaggtggagttcaagaccatgaatgcaaagcttctgatggatcctaagaggcagatctttctagatcaaaacatgctggcagttattgatgagctgatgcaggccctgaatttcaacagtgagactgtgccacaaaaatcctcccttgaagaaccggatttttataaaactaaaatcaagctctgcatacttcttcatgctttcagaattcgggcagtgactattgatagagtgatgagctatctgaatgcttccggaagcggagctactaacttcagcctgctgaagcaggctggagacgtggaggagaaccctggaccttgtcaccagcagttggtcatctcttggttttccctggtttttctggcatctcccctcgtggccatatgggaactgaagaaagatgtttatgtcgtagaattggattggtatccggatgcccctggagaaatggtggtcctcacctgtgacacccctgaagaagatggtatcacctggaccttggaccagagcagtgaggtcttaggctctggcaaaaccctgaccatccaagtcaaagagtttggagatgctggccagtacacctgtcacaaaggaggcgaggttctaagccattcgctcctgctgcttcacaaaaaggaagatggaatttggtccactgatattttaaaggaccagaaagaacccaaaaataagacctttctaagatgcgaggccaagaattattctggacgtttcacctgctggtggctgacgacaatcagtactgatttgacattcagtgtcaaaagcagcagaggctcttctgacccccaaggggtgacgtgcggagctgctacactctctgcagagagagtcagaggggacaacaaggagtatgagtactcagtggagtgccaggaggacagtgcctgcccagctgctgaggagagtctgcccattgaggtcatggtggatgccgttcacaagctcaagtatgaaaactacaccagcagcttcttcatcagggacatcatcaaacctgacccacccaagaacttgcagctgaagccattaaagaattctcggcaggtggaggtcagctgggagtaccctgacacctggagtactccacattcctacttctccctgacattctgcgttcaggtccagggcaagagcaagagagaaaagaaagatagagtcttcacggacaagacctcagccacggtcatctgccgcaaaaatgccagcattagcgtgcgggcccaggaccgctactatagctcatcttggagcgaatgggcatctgtgccctgcagttaa

SEQ ID NO: 117 - DNA, 1623 bp, Artificial Sequence
  DNA sequence for the protein coding sequence of the NG-702 transgene cassette, including the stop codon
atgtgtcaccagcagttggtcatctcttggttttccctggtttttctggcatctcccctcgtggccatatgggaactgaagaaagatgtttatgtcgtagaattggattggtatccggatgcccctggagaaatggtggtcctcacctgtgacacccctgaagaagatggtatcacctggaccttggaccagagcagtgaggtcttaggctctggcaaaaccctgaccatccaagtcaaagagtttggagatgctggccagtacacctgtcacaaaggaggcgaggttctaagccattcgctcctgctgcttcacaaaaaggaagatggaatttggtccactgatattttaaaggaccagaaagaacccaaaaataagacctttctaagatgcgaggccaagaattattctggacgtttcacctgctggtggctgacgacaatcagtactgatttgacattcagtgtcaaaagcagcagaggctcttctgacccccaaggggtgacgtgcggagctgctacactctctgcagagagagtcagaggggacaacaaggagtatgagtactcagtggagtgccaggaggacagtgcctgcccagctgctgaggagagtctgcccattgaggtcatggtggatgccgttcacaagctcaagtatgaaaactacaccagcagcttcttcatcagggacatcatcaaacctgacccacccaagaacttgcagctgaagccattaaagaattctcggcaggtggaggtcagctgggagtaccctgacacctggagtactccacattcctacttctccctgacattctgcgttcaggtccagggcaagagcaagagagaaaagaaagatagagtcttcacggacaagacctcagccacggtcatctgccgcaaaaatgccagcattagcgtgcgggcccaggaccgctactatagctcatcttggagcgaatgggcatctgtgccctgcagtggagggggcggcagcgggggaggcggcagcggcggcgggggatcgagaaacctccccgtggccactccagacccaggaatgttcccatgccttcaccactcccaaaacctgctgagggccgtcagcaacatgctccagaaggccagacaaactctagaattttacccttgcacttctgaagagattgatcatgaagatatcacaaaagataaaaccagcacagtggaggcctgtttaccattggaattaaccaagaatgagagttgcctaaattccagagagacctctttcataactaatgggagttgcctggcctccagaaagacctcttttatgatggccctgtgccttagtagtatttatgaagacttgaagatgtaccaggtggagttcaagaccatgaatgcaaagcttctgatggatcctaagaggcagatctttctagatcaaaacatgctggcagttattgatgagctgatgcaggccctgaatttcaacagtgagactgtgccacaaaaatcctcccttgaagaaccggatttttataaaactaaaatcaagctctgcatacttcttcatgctttcagaattcgggcagtgactattgatagagtgatgagctatctgaatgcttcctaa

SEQ ID NO: 118 - DNA, 1623 bp, Artificial Sequence
  DNA sequence for the protein coding sequence of the NG-703 transgene cassette, including the stop codon
atgtgtccagcgcgcagcctcctccttgtggctaccctggtcctcctggaccacctcagtttggccagaaacctccccgtggccactccagacccaggaatgttcccatgccttcaccactcccaaaacctgctgagggccgtcagcaacatgctccagaaggccagacaaactctagaattttacccttgcacttctgaagagattgatcatgaagatatcacaaaagataaaaccagcacagtggaggcctgtttaccattggaattaaccaagaatgagagttgcctaaattccagagagacctctttcataactaatgggagttgcctggcctccagaaagacctcttttatgatggccctgtgccttagtagtatttatgaagacttgaagatgtaccaggtggagttcaagaccatgaatgcaaagcttctgatggatcctaagaggcagatctttctagatcaaaacatgctggcagttattgatgagctgatgcaggccctgaatttcaacagtgagactgtgccacaaaaatcctcccttgaagaaccggatttttataaaactaaaatcaagctctgcatacttcttcatgctttcagaattcgggcagtgactattgatagagtgatgagctatctgaatgcttccggagggggcggcagcgggggaggcggcagcggcggcgggggatcgatatgggaactgaagaaagatgtttatgtcgtagaattggattggtatccggatgcccctggagaaatggtggtcctcacctgtgacacccctgaagaagatggtatcacctggaccttggaccagagcagtgaggtcttaggctctggcaaaaccctgaccatccaagtcaaagagtttggagatgctggccagtacacctgtcacaaaggaggcgaggttctaagccattcgctcctgctgcttcacaaaaaggaagatggaatttggtccactgatattttaaaggaccagaaagaacccaaaaataagacctttctaagatgcgaggccaagaattattctggacgtttcacctgctggtggctgacgacaatcagtactgatttgacattcagtgtcaaaagcagcagaggctcttctgacccccaaggggtgacgtgcggagctgctacactctctgcagagagagtcagaggggacaacaaggagtatgagtactcagtggagtgccaggaggacagtgcctgcccagctgctgaggagagtctgcccattgaggtcatggtggatgccgttcacaagctcaagtatgaaaactacaccagcagcttcttcatcagggacatcatcaaacctgacccacccaagaacttgcagctgaagccattaaagaattctcggcaggtggaggtcagctgggagtaccctgacacctggagtactccacattcctacttctccctgacattctgcgttcaggtccagggcaagagcaagagagaaaagaaagatagagtcttcacggacaagacctcagccacggtcatctgccgcaaaaatgccagcattagcgtgcgggcccaggaccgctactatagctcatcttggagcgaatgggcatctgtgccctgcagttaa

SEQ ID NO: 119 - DNA, 2250 bp, Artificial Sequence
  DNA sequence for the protein coding sequence of the NG-704 transgene cassette, including the stop codon
atgtgtcaccagcagttggtcatctcttggttttccctggtttttctggcatctcccctcgtggccatatgggaactgaagaaagatgtttatgtcgtagaattggattggtatccggatgcccctggagaaatggtggtcctcacctgtgacacccctgaagaagatggtatcacctggaccttggaccagagcagtgaggtcttaggctctggcaaaaccctgaccatccaagtcaaagagtttggagatgctggccagtacacctgtcacaaaggaggcgaggttctaagccattcgctcctgctgcttcacaaaaaggaagatggaatttggtccactgatattttaaaggaccagaaagaacccaaaaataagacctttctaagatgcgaggccaagaattattctggacgtttcacctgctggtggctgacgacaatcagtactgatttgacattcagtgtcaaaagcagcagaggctcttctgacccccaaggggtgacgtgcggagctgctacactctctgcagagagagtcagaggggacaacaaggagtatgagtactcagtggagtgccaggaggacagtgcctgcccagctgctgaggagagtctgcccattgaggtcatggtggatgccgttcacaagctcaagtatgaaaactacaccagcagcttcttcatcagggacatcatcaaacctgacccacccaagaacttgcagctgaagccattaaagaattctcggcaggtggaggtcagctgggagtaccctgacacctggagtactccacattcctacttctccctgacattctgcgttcaggtccagggcaagagcaagagagaaaagaaagatagagtcttcacggacaagacctcagccacggtcatctgccgcaaaaatgccagcattagcgtgcgggcccaggaccgctactatagctcatcttggagcgaatgggcatctgtgccctgcagtggagggggcggcagcgggggaggcggcagcggcggcgggggatcgagaaacctccccgtggccactccagacccaggaatgttcccatgccttcaccactcccaaaacctgctgagggccgtcagcaacatgctccagaaggccagacaaactctagaattttacccttgcacttctgaagagattgatcatgaagatatcacaaaagataaaaccagcacagtggaggcctgtttaccattggaattaaccaagaatgagagttgcctaaattccagagagacctctttcataactaatgggagttgcctggcctccagaaagacctcttttatgatggccctgtgccttagtagtatttatgaagacttgaagatgtaccaggtggagttcaagaccatgaatgcaaagcttctgatggatcctaagaggcagatctttctagatcaaaacatgctggcagttattgatgagctgatgcaggccctgaatttcaacagtgagactgtgccacaaaaatcctcccttgaagaaccggatttttataaaactaaaatcaagctctgcatacttcttcatgctttcagaattcgggcagtgactattgatagagtgatgagctatctgaatgcttccggaagcggagctactaacttcagcctgctgaagcaggctggagacgtggaggagaaccctggacctgccttgacctttgctttactggtggccctcctggtgctcagctgcaagtcaagctgctctgtgggctgtgatctgcctcaaacccacagcctgggtagcaggaggaccttgatgctcctggcacagatgaggagaatctctcttttctcctgcttgaaggacagacatgactttggatttccccaggaggagtttggcaaccagttccaaaaggctgaaaccatccctgtcctccatgagatgatccagcagatcttcaatctcttcagcacaaaggactcatctgctgcttgggatgagaccctcctagacaaattctacactgaactctaccagcagctgaatgacctggaagcctgtgtgatacagggggtgggggtgacagagactcccctgatgaaggaggactccattctggctgtgaggaaatacttccaaagaatcactctctatctgaaagagaagaaatacagcccttgtgcctgggaggttgtcagagcagaaatcatgagatctttttctttgtcaacaaacttgcaagaaagtttaagaagtaaggaataa

SEQ ID NO: 120 - DNA, 2250 bp, Artificial Sequence
  DNA sequence for the protein coding sequence of the NG-706 transgene cassette, including the stop codon
atggccttgacctttgctttactggtggccctcctggtgctcagctgcaagtcaagctgctctgtgggctgtgatctgcctcaaacccacagcctgggtagcaggaggaccttgatgctcctggcacagatgaggagaatctctcttttctcctgcttgaaggacagacatgactttggatttccccaggaggagtttggcaaccagttccaaaaggctgaaaccatccctgtcctccatgagatgatccagcagatcttcaatctcttcagcacaaaggactcatctgctgcttgggatgagaccctcctagacaaattctacactgaactctaccagcagctgaatgacctggaagcctgtgtgatacagggggtgggggtgacagagactcccctgatgaaggaggactccattctggctgtgaggaaatacttccaaagaatcactctctatctgaaagagaagaaatacagcccttgtgcctgggaggttgtcagagcagaaatcatgagatctttttctttgtcaacaaacttgcaagaaagtttaagaagtaaggaaggaagcggagctactaacttcagcctgctgaagcaggctggagacgtggaggagaaccctggaccttgtcaccagcagttggtcatctcttggttttccctggtttttctggcatctcccctcgtggccatatgggaactgaagaaagatgtttatgtcgtagaattggattggtatccggatgcccctggagaaatggtggtcctcacctgtgacacccctgaagaagatggtatcacctggaccttggaccagagcagtgaggtcttaggctctggcaaaaccctgaccatccaagtcaaagagtttggagatgctggccagtacacctgtcacaaaggaggcgaggttctaagccattcgctcctgctgcttcacaaaaaggaagatggaatttggtccactgatattttaaaggaccagaaagaacccaaaaataagacctttctaagatgcgaggccaagaattattctggacgtttcacctgctggtggctgacgacaatcagtactgatttgacattcagtgtcaaaagcagcagaggctcttctgacccccaaggggtgacgtgcggagctgctacactctctgcagagagagtcagaggggacaacaaggagtatgagtactcagtggagtgccaggaggacagtgcctgcccagctgctgaggagagtctgcccattgaggtcatggtggatgccgttcacaagctcaagtatgaaaactacaccagcagcttcttcatcagggacatcatcaaacctgacccacccaagaacttgcagctgaagccattaaagaattctcggcaggtggaggtcagctgggagtaccctgacacctggagtactccacattcctacttctccctgacattctgcgttcaggtccagggcaagagcaagagagaaaagaaagatagagtcttcacggacaagacctcagccacggtcatctgccgcaaaaatgccagcattagcgtgcgggcccaggaccgctactatagctcatcttggagcgaatgggcatctgtgccctgcagtggagggggcggcagcgggggaggcggcagcggcggcgggggatcgagaaacctccccgtggccactccagacccaggaatgttcccatgccttcaccactcccaaaacctgctgagggccgtcagcaacatgctccagaaggccagacaaactctagaattttacccttgcacttctgaagagattgatcatgaagatatcacaaaagataaaaccagcacagtggaggcctgtttaccattggaattaaccaagaatgagagttgcctaaattccagagagacctctttcataactaatgggagttgcctggcctccagaaagacctcttttatgatggccctgtgccttagtagtatttatgaagacttgaagatgtaccaggtggagttcaagaccatgaatgcaaagcttctgatggatcctaagaggcagatctttctagatcaaaacatgctggcagttattgatgagctgatgcaggccctgaatttcaacagtgagactgtgccacaaaaatcctcccttgaagaaccggatttttataaaactaaaatcaagctctgcatacttcttcatgctttcagaattcgggcagtgactattgatagagtgatgagctatctgaatgcttcctaa

SEQ ID NO: 121 - DNA, 3642 bp, Artificial Sequence
  DNA sequence for the protein coding sequence of the NG-707 transgene cassette, including the stop codon
atgacagtgctggcgccagcctggagcccaacaacctatctcctcctgctgctgctgctgagctcgggactcagtgggacccaggactgctccttccaacacagccccatctcctccgacttcgctgtcaaaatccgtgagctgtctgactacctgcttcaagattacccagtcaccgtggcctccaacctccaggacgaggagctctgcgggggcctctggcggctggtcctggcacagcgctggatggagcggctcaagactgtcgctgggtccaagatgcaaggcttgctggagcgcgtgaacacggagatacactttgtcaccaaatgtgcctttcagcccccccccagctgtcttcgcttcgtccagaccaacatctcccgcctcctacaggagacctccgagcagctggtggcgctgaagccctggatcactcgccagaacttctcccggtgcctggagctgcagtgtcagcccgactcctcaaccctgccacccccatggagtccccggcccctggaggccacagccccgggaagcggagctactaacttcagcctgctgaagcaggctggagacgtggaggagaaccctggacctcaggtctccactgctgcccttgccgtcctcctctgcaccatggctctctgcaaccaggtcctctctgcaccacttgctgctgacacgccgaccgcctgctgcttcagctacacctcccgacagattccacagaatttcatagctgactactttgagacgagcagccagtgctccaagcccagtgtcatcttcctaaccaagagaggccggcaggtctgtgctgaccccagtgaggagtgggtccagaaatacgtcagtgacctggagctgagtgccggaagcggagagggcagaggaagtctgctaacatgcggtgacgtcgaggagaatcctggacctgccttgacctttgctttactggtggccctcctggtgctcagctgcaagtcaagctgctctgtgggctgtgatctgcctcaaacccacagcctgggtagcaggaggaccttgatgctcctggcacagatgaggagaatctctcttttctcctgcttgaaggacagacatgactttggatttccccaggaggagtttggcaaccagttccaaaaggctgaaaccatccctgtcctccatgagatgatccagcagatcttcaatctcttcagcacaaaggactcatctgctgcttgggatgagaccctcctagacaaattctacactgaactctaccagcagctgaatgacctggaagcctgtgtgatacagggggtgggggtgacagagactcccctgatgaaggaggactccattctggctgtgaggaaatacttccaaagaatcactctctatctgaaagagaagaaatacagcccttgtgcctgggaggttgtcagagcagaaatcatgagatctttttctttgtcaacaaacttgcaagaaagtttaagaagtaaggaaggaagcggacagtgtactaattatgctctcttgaaattggctggagatgttgagagcaaccctggacctaagaaaagtggtgttcttttcctcttgggcatcatcttgctggttctgattggagtgcaaggaaccccagtagtgagaaagggtcgctgttcctgcatcagcaccaaccaagggactatccacctacaatccttgaaagaccttaaacaatttgccccaagcccttcctgcgagaaaattgaaatcattgctacactgaagaatggagttcaaacatgtctaaacccagattcagcagatgtgaaggaactgattaaaaagtgggagaaacaggtcagccaaaagaaaaagcaaaagaatgggaaaaaacatcaaaaaaagaaagttctgaaagttcgaaaatctcaacgttctcgtcaaaagaagactacaggaagcggagtgaaacagactttgaattttgaccttctcaagttggcgggagacgtggagtccaaccctggacctatgtgtcaccagcagttggtcatctcttggttttccctggtttttctggcatctcccctcgtggccatatgggaactgaagaaagatgtttatgtcgtagaattggattggtatccggatgcccctggagaaatggtggtcctcacctgtgacacccctgaagaagatggtatcacctggaccttggaccagagcagtgaggtcttaggctctggcaaaaccctgaccatccaagtcaaagagtttggagatgctggccagtacacctgtcacaaaggaggcgaggttctaagccattcgctcctgctgcttcacaaaaaggaagatggaatttggtccactgatattttaaaggaccagaaagaacccaaaaataagacctttctaagatgcgaggccaagaattattctggacgtttcacctgctggtggctgacgacaatcagtactgatttgacattcagtgtcaaaagcagcagaggctcttctgacccccaaggggtgacgtgcggagctgctacactctctgcagagagagtcagaggggacaacaaggagtatgagtactcagtggagtgccaggaggacagtgcctgcccagctgctgaggagagtctgcccattgaggtcatggtggatgccgttcacaagctcaagtatgaaaactacaccagcagcttcttcatcagggacatcatcaaacctgacccacccaagaacttgcagctgaagccattaaagaattctcggcaggtggaggtcagctgggagtaccctgacacctggagtactccacattcctacttctccctgacattctgcgttcaggtccagggcaagagcaagagagaaaagaaagatagagtcttcacggacaagacctcagccacggtcatctgccgcaaaaatgccagcattagcgtgcgggcccaggaccgctactatagctcatcttggagcgaatgggcatctgtgccctgcagtggagggggcggcagcgggggaggcggcagcggcggcgggggatcgagaaacctccccgtggccactccagacccaggaatgttcccatgccttcaccactcccaaaacctgctgagggccgtcagcaacatgctccagaaggccagacaaactctagaattttacccttgcacttctgaagagattgatcatgaagatatcacaaaagataaaaccagcacagtggaggcctgtttaccattggaattaaccaagaatgagagttgcctaaattccagagagacctctttcataactaatgggagttgcctggcctccagaaagacctcttttatgatggccctgtgccttagtagtatttatgaagacttgaagatgtaccaggtggagttcaagaccatgaatgcaaagcttctgatggatcctaagaggcagatctttctagatcaaaacatgctggcagttattgatgagctgatgcaggccctgaatttcaacagtgagactgtgccacaaaaatcctcccttgaagaaccggatttttataaaactaaaatcaagctctgcatacttcttcatgctttcagaattcgggcagtgactattgatagagtgatgagctatctgaatgcttcctaa

SEQ ID NO: 122 - DNA, 3033 bp, Artificial Sequence
  DNA sequence for the protein coding sequence of the NG-708 transgene cassette, including the stop codon
atgtgtcaccagcagttggtcatctcttggttttccctggtttttctggcatctcccctcgtggccatatgggaactgaagaaagatgtttatgtcgtagaattggattggtatccggatgcccctggagaaatggtggtcctcacctgtgacacccctgaagaagatggtatcacctggaccttggaccagagcagtgaggtcttaggctctggcaaaaccctgaccatccaagtcaaagagtttggagatgctggccagtacacctgtcacaaaggaggcgaggttctaagccattcgctcctgctgcttcacaaaaaggaagatggaatttggtccactgatattttaaaggaccagaaagaacccaaaaataagacctttctaagatgcgaggccaagaattattctggacgtttcacctgctggtggctgacgacaatcagtactgatttgacattcagtgtcaaaagcagcagaggctcttctgacccccaaggggtgacgtgcggagctgctacactctctgcagagagagtcagaggggacaacaaggagtatgagtactcagtggagtgccaggaggacagtgcctgcccagctgctgaggagagtctgcccattgaggtcatggtggatgccgttcacaagctcaagtatgaaaactacaccagcagcttcttcatcagggacatcatcaaacctgacccacccaagaacttgcagctgaagccattaaagaattctcggcaggtggaggtcagctgggagtaccctgacacctggagtactccacattcctacttctccctgacattctgcgttcaggtccagggcaagagcaagagagaaaagaaagatagagtcttcacggacaagacctcagccacggtcatctgccgcaaaaatgccagcattagcgtgcgggcccaggaccgctactatagctcatcttggagcgaatgggcatctgtgccctgcagtggagggggcggcagcgggggaggcggcagcggcggcgggggatcgagaaacctccccgtggccactccagacccaggaatgttcccatgccttcaccactcccaaaacctgctgagggccgtcagcaacatgctccagaaggccagacaaactctagaattttacccttgcacttctgaagagattgatcatgaagatatcacaaaagataaaaccagcacagtggaggcctgtttaccattggaattaaccaagaatgagagttgcctaaattccagagagacctctttcataactaatgggagttgcctggcctccagaaagacctcttttatgatggccctgtgccttagtagtatttatgaagacttgaagatgtaccaggtggagttcaagaccatgaatgcaaagcttctgatggatcctaagaggcagatctttctagatcaaaacatgctggcagttattgatgagctgatgcaggccctgaatttcaacagtgagactgtgccacaaaaatcctcccttgaagaaccggatttttataaaactaaaatcaagctctgcatacttcttcatgctttcagaattcgggcagtgactattgatagagtgatgagctatctgaatgcttccggaagcggagctactaacttcagcctgctgaagcaggctggagacgtggaggagaaccctggacctatggctcagtcactggctctgagcctccttatcctggttctggcctttggcatccccaggacccaaggcagtgatggaggggctcaggactgttgcctcaagtacagccaaaggaagattcccgccaaggttgtccgcagctaccggaagcaggaaccaagcttaggctgctccatcccagctatcctgttcttgccccgcaagcgctctcaggcagagctatgtgcagacccaaaggagctctgggtgcagcagctgatgcagcatctggacaagacaccatccccacagaaaccagcccagggctgcaggaaggacaggggggcctccaagactggcaagaaaggaaagggctccaaaggctgcaagaggactgagcggtcacagacccctaaagggccaggaagcggagagggcagaggaagtctgctaacatgcggtgacgtcgaggagaatcctggacctatgaaggtctccgcggcagccctcgctgtcatcctcattgctactgccctctgcgctcctgcatctgcctccccatattcctcggacaccacaccctgctgctttgcctacattgcccgcccactgccccgtgcccacatcaaggagtatttctacaccagtggcaagtgctccaacccagcagtcgtctttgtcacccgaaagaaccgccaagtgtgtgccaacccagagaagaaatgggttcgggagtacatcaactctttggagatgagcggaagcggacagtgtactaattatgctctcttgaaattggctggagatgttgagagcaaccctggacctatgacagtgctggcgccagcctggagcccaacaacctatctcctcctgctgctgctgctgagctcgggactcagtgggacccaggactgctccttccaacacagccccatctcctccgacttcgctgtcaaaatccgtgagctgtctgactacctgcttcaagattacccagtcaccgtggcctccaacctccaggacgaggagctctgcgggggcctctggcggctggtcctggcacagcgctggatggagcggctcaagactgtcgctgggtccaagatgcaaggcttgctggagcgcgtgaacacggagatacactttgtcaccaaatgtgcctttcagcccccccccagctgtcttcgcttcgtccagaccaacatctcccgcctcctacaggagacctccgagcagctggtggcgctgaagccctggatcactcgccagaacttctcccggtgcctggagctgcagtgtcagcccgactcctcaaccctgccacccccatggagtccccggcccctggaggccacagccccgtaa

SEQ ID NO: 123 - DNA, 3258 bp, Artificial Sequence
  DNA sequence for the protein coding sequence of the NG-709 transgene cassette, including the stop codon
atggccttgacctttgctttactggtggccctcctggtgctcagctgcaagtcaagctgctctgtgggctgtgatctgcctcaaacccacagcctgggtagcaggaggaccttgatgctcctggcacagatgaggagaatctctcttttctcctgcttgaaggacagacatgactttggatttccccaggaggagtttggcaaccagttccaaaaggctgaaaccatccctgtcctccatgagatgatccagcagatcttcaatctcttcagcacaaaggactcatctgctgcttgggatgagaccctcctagacaaattctacactgaactctaccagcagctgaatgacctggaagcctgtgtgatacagggggtgggggtgacagagactcccctgatgaaggaggactccattctggctgtgaggaaatacttccaaagaatcactctctatctgaaagagaagaaatacagcccttgtgcctgggaggttgtcagagcagaaatcatgagatctttttctttgtcaacaaacttgcaagaaagtttaagaagtaaggaaggaagcggagctactaacttcagcctgctgaagcaggctggagacgtggaggagaaccctggacctatggccctgctactggccctcagcctgctggttctctggacttccccagccccaactctgagtggcaccaatgatgctgaagactgctgcctgtctgtgacccagaaacccatccctgggtacatcgtgaggaacttccactaccttctcatcaaggatggctgcagggtgcctgctgtagtgttcaccacactgaggggccgccagctctgtgcacccccagaccagccctgggtagaacgcatcatccagagactgcagaggacctcagccaagatgaagcgccgcagcagtggaagcggagagggcagaggaagtctgctaacatgcggtgacgtcgaggagaatcctggacctatggctgctgaaccagtagaagacaattgcatcaactttgtggcaatgaaatttattgacaatacgctttactttatagctgaagatgatgaaaacctggaatcagattactttggcaagcttgaatctaaattatcagtcataagaaatttgaatgaccaagttctcttcattgaccaaggaaatcggcctctatttgaagatatgactgattctgactgtagagataatgcaccccggaccatatttattataagtatgtataaagatagccagcctagaggtatggctgtaactatctctgtgaagtgtgagaaaatttcaactctctcctgtgagaacaaaattatttcctttaaggaaatgaatcctcctgataacatcaaggatacaaaaagtgacatcatattctttcagagaagtgtcccaggacatgataataagatgcaatttgaatcttcatcatacgaaggatactttctagcttgtgaaaaagagagagacctttttaaactcattttgaaaaaagaggatgaattgggggatagatctataatgttcactgttcaaaacgaagacggaagcggacagtgtactaattatgctctcttgaaattggctggagatgttgagagcaaccctggacctatgtgtcaccagcagttggtcatctcttggttttccctggtttttctggcatctcccctcgtggccatatgggaactgaagaaagatgtttatgtcgtagaattggattggtatccggatgcccctggagaaatggtggtcctcacctgtgacacccctgaagaagatggtatcacctggaccttggaccagagcagtgaggtcttaggctctggcaaaaccctgaccatccaagtcaaagagtttggagatgctggccagtacacctgtcacaaaggaggcgaggttctaagccattcgctcctgctgcttcacaaaaaggaagatggaatttggtccactgatattttaaaggaccagaaagaacccaaaaataagacctttctaagatgcgaggccaagaattattctggacgtttcacctgctggtggctgacgacaatcagtactgatttgacattcagtgtcaaaagcagcagaggctcttctgacccccaaggggtgacgtgcggagctgctacactctctgcagagagagtcagaggggacaacaaggagtatgagtactcagtggagtgccaggaggacagtgcctgcccagctgctgaggagagtctgcccattgaggtcatggtggatgccgttcacaagctcaagtatgaaaactacaccagcagcttcttcatcagggacatcatcaaacctgacccacccaagaacttgcagctgaagccattaaagaattctcggcaggtggaggtcagctgggagtaccctgacacctggagtactccacattcctacttctccctgacattctgcgttcaggtccagggcaagagcaagagagaaaagaaagatagagtcttcacggacaagacctcagccacggtcatctgccgcaaaaatgccagcattagcgtgcgggcccaggaccgctactatagctcatcttggagcgaatgggcatctgtgccctgcagtggagggggcggcagcgggggaggcggcagcggcggcgggggatcgagaaacctccccgtggccactccagacccaggaatgttcccatgccttcaccactcccaaaacctgctgagggccgtcagcaacatgctccagaaggccagacaaactctagaattttacccttgcacttctgaagagattgatcatgaagatatcacaaaagataaaaccagcacagtggaggcctgtttaccattggaattaaccaagaatgagagttgcctaaattccagagagacctctttcataactaatgggagttgcctggcctccagaaagacctcttttatgatggccctgtgccttagtagtatttatgaagacttgaagatgtaccaggtggagttcaagaccatgaatgcaaagcttctgatggatcctaagaggcagatctttctagatcaaaacatgctggcagttattgatgagctgatgcaggccctgaatttcaacagtgagactgtgccacaaaaatcctcccttgaagaaccggatttttataaaactaaaatcaagctctgcatacttcttcatgctttcagaattcgggcagtgactattgatagagtgatgagctatctgaatgcttcctaa

SEQ ID NO: 124 - DNA, 3624 bp, Artificial Sequence
  DNA sequence for the protein coding sequence of the NG-720 transgene cassette, including the stop codon
atgtgtcaccagcagttggtcatctcttggttttccctggtttttctggcatctcccctcgtggccatatgggaactgaagaaagatgtttatgtcgtagaattggattggtatccggatgcccctggagaaatggtggtcctcacctgtgacacccctgaagaagatggtatcacctggaccttggaccagagcagtgaggtcttaggctctggcaaaaccctgaccatccaagtcaaagagtttggagatgctggccagtacacctgtcacaaaggaggcgaggttctaagccattcgctcctgctgcttcacaaaaaggaagatggaatttggtccactgatattttaaaggaccagaaagaacccaaaaataagacctttctaagatgcgaggccaagaattattctggacgtttcacctgctggtggctgacgacaatcagtactgatttgacattcagtgtcaaaagcagcagaggctcttctgacccccaaggggtgacgtgcggagctgctacactctctgcagagagagtcagaggggacaacaaggagtatgagtactcagtggagtgccaggaggacagtgcctgcccagctgctgaggagagtctgcccattgaggtcatggtggatgccgttcacaagctcaagtatgaaaactacaccagcagcttcttcatcagggacatcatcaaacctgacccacccaagaacttgcagctgaagccattaaagaattctcggcaggtggaggtcagctgggagtaccctgacacctggagtactccacattcctacttctccctgacattctgcgttcaggtccagggcaagagcaagagagaaaagaaagatagagtcttcacggacaagacctcagccacggtcatctgccgcaaaaatgccagcattagcgtgcgggcccaggaccgctactatagctcatcttggagcgaatgggcatctgtgccctgcagtggagggggcggcagcgggggaggcggcagcggcggcgggggatcgagaaacctccccgtggccactccagacccaggaatgttcccatgccttcaccactcccaaaacctgctgagggccgtcagcaacatgctccagaaggccagacaaactctagaattttacccttgcacttctgaagagattgatcatgaagatatcacaaaagataaaaccagcacagtggaggcctgtttaccattggaattaaccaagaatgagagttgcctaaattccagagagacctctttcataactaatgggagttgcctggcctccagaaagacctcttttatgatggccctgtgccttagtagtatttatgaagacttgaagatgtaccaggtggagttcaagaccatgaatgcaaagcttctgatggatcctaagaggcagatctttctagatcaaaacatgctggcagttattgatgagctgatgcaggccctgaatttcaacagtgagactgtgccacaaaaatcctcccttgaagaaccggatttttataaaactaaaatcaagctctgcatacttcttcatgctttcagaattcgggcagtgactattgatagagtgatgagctatctgaatgcttccggaagcggagctactaacttcagcctgctgaagcaggctggagacgtggaggagaaccctggacctgactggacctggcgcatcctgttcttggtggcagctgctacgggagctcattccaactgggtgaatgtaataagtgatttgaaaaaaattgaagatcttattcaatctatgcatattgatgctactttatatacggaaagtgatgttcaccccagttgcaaagtaacagcaatgaagtgctttctcttggagttacaagttatttcacttgagtccggagatgcaagtattcatgatacagtagaaaatctgatcatcctagcaaacaacagtttgtcttctaatgggaatgtaacagaatctggatgcaaagaatgtgaggaactggaggaaaaaaatattaaagaatttttgcagagttttgtacatattgtccaaatgttcatcaacacttctggaagcggagagggcagaggaagtctgctaacatgcggtgacgtcgaggagaatcctggacctaagaaaagtggtgttcttttcctcttgggcatcatcttgctggttctgattggagtgcaaggaaccccagtagtgagaaagggtcgctgttcctgcatcagcaccaaccaagggactatccacctacaatccttgaaagaccttaaacaatttgccccaagcccttcctgcgagaaaattgaaatcattgctacactgaagaatggagttcaaacatgtctaaacccagattcagcagatgtgaaggaactgattaaaaagtgggagaaacaggtcagccaaaagaaaaagcaaaagaatgggaaaaaacatcaaaaaaagaaagttctgaaagttcgaaaatctcaacgttctcgtcaaaagaagactacaggaagcggacagtgtactaattatgctctcttgaaattggctggagatgttgagagcaaccctggacctgctcagtcactggctctgagcctccttatcctggttctggcctttggcatccccaggacccaaggcagtgatggaggggctcaggactgttgcctcaagtacagccaaaggaagattcccgccaaggttgtccgcagctaccggaagcaggaaccaagcttaggctgctccatcccagctatcctgttcttgccccgcaagcgctctcaggcagagctatgtgcagacccaaaggagctctgggtgcagcagctgatgcagcatctggacaagacaccatccccacagaaaccagcccagggctgcaggaaggacaggggggcctccaagactggcaagaaaggaaagggctccaaaggctgcaagaggactgagcggtcacagacccctaaagggccaggaagcggagtgaaacagactttgaattttgaccttctcaagttggcgggagacgtggagtccaaccctggacctgccttgacctttgctttactggtggccctcctggtgctcagctgcaagtcaagctgctctgtgggctgtgatctgcctcaaacccacagcctgggtagcaggaggaccttgatgctcctggcacagatgaggagaatctctcttttctcctgcttgaaggacagacatgactttggatttccccaggaggagtttggcaaccagttccaaaaggctgaaaccatccctgtcctccatgagatgatccagcagatcttcaatctcttcagcacaaaggactcatctgctgcttgggatgagaccctcctagacaaattctacactgaactctaccagcagctgaatgacctggaagcctgtgtgatacagggggtgggggtgacagagactcccctgatgaaggaggactccattctggctgtgaggaaatacttccaaagaatcactctctatctgaaagagaagaaatacagcccttgtgcctgggaggttgtcagagcagaaatcatgagatctttttctttgtcaacaaacttgcaagaaagtttaagaagtaaggaataa

SEQ ID NO: 125 - DNA, 3528 bp, Artificial Sequence
  DNA sequence for the protein coding sequence of the NG-721 transgene cassette, including the stop codon
atgtgtcaccagcagttggtcatctcttggttttccctggtttttctggcatctcccctcgtggccatatgggaactgaagaaagatgtttatgtcgtagaattggattggtatccggatgcccctggagaaatggtggtcctcacctgtgacacccctgaagaagatggtatcacctggaccttggaccagagcagtgaggtcttaggctctggcaaaaccctgaccatccaagtcaaagagtttggagatgctggccagtacacctgtcacaaaggaggcgaggttctaagccattcgctcctgctgcttcacaaaaaggaagatggaatttggtccactgatattttaaaggaccagaaagaacccaaaaataagacctttctaagatgcgaggccaagaattattctggacgtttcacctgctggtggctgacgacaatcagtactgatttgacattcagtgtcaaaagcagcagaggctcttctgacccccaaggggtgacgtgcggagctgctacactctctgcagagagagtcagaggggacaacaaggagtatgagtactcagtggagtgccaggaggacagtgcctgcccagctgctgaggagagtctgcccattgaggtcatggtggatgccgttcacaagctcaagtatgaaaactacaccagcagcttcttcatcagggacatcatcaaacctgacccacccaagaacttgcagctgaagccattaaagaattctcggcaggtggaggtcagctgggagtaccctgacacctggagtactccacattcctacttctccctgacattctgcgttcaggtccagggcaagagcaagagagaaaagaaagatagagtcttcacggacaagacctcagccacggtcatctgccgcaaaaatgccagcattagcgtgcgggcccaggaccgctactatagctcatcttggagcgaatgggcatctgtgccctgcagtggagggggcggcagcgggggaggcggcagcggcggcgggggatcgagaaacctccccgtggccactccagacccaggaatgttcccatgccttcaccactcccaaaacctgctgagggccgtcagcaacatgctccagaaggccagacaaactctagaattttacccttgcacttctgaagagattgatcatgaagatatcacaaaagataaaaccagcacagtggaggcctgtttaccattggaattaaccaagaatgagagttgcctaaattccagagagacctctttcataactaatgggagttgcctggcctccagaaagacctcttttatgatggccctgtgccttagtagtatttatgaagacttgaagatgtaccaggtggagttcaagaccatgaatgcaaagcttctgatggatcctaagaggcagatctttctagatcaaaacatgctggcagttattgatgagctgatgcaggccctgaatttcaacagtgagactgtgccacaaaaatcctcccttgaagaaccggatttttataaaactaaaatcaagctctgcatacttcttcatgctttcagaattcgggcagtgactattgatagagtgatgagctatctgaatgcttccggaagcggagctactaacttcagcctgctgaagcaggctggagacgtggaggagaaccctggacctgactggacctggcgcatcctgttcttggtggcagctgctacgggagctcattccaactgggtgaatgtaataagtgatttgaaaaaaattgaagatcttattcaatctatgcatattgatgctactttatatacggaaagtgatgttcaccccagttgcaaagtaacagcaatgaagtgctttctcttggagttacaagttatttcacttgagtccggagatgcaagtattcatgatacagtagaaaatctgatcatcctagcaaacaacagtttgtcttctaatgggaatgtaacagaatctggatgcaaagaatgtgaggaactggaggaaaaaaatattaaagaatttttgcagagttttgtacatattgtccaaatgttcatcaacacttctggaagcggagagggcagaggaagtctgctaacatgcggtgacgtcgaggagaatcctggacctaagaaaagtggtgttcttttcctcttgggcatcatcttgctggttctgattggagtgcaaggaaccccagtagtgagaaagggtcgctgttcctgcatcagcaccaaccaagggactatccacctacaatccttgaaagaccttaaacaatttgccccaagcccttcctgcgagaaaattgaaatcattgctacactgaagaatggagttcaaacatgtctaaacccagattcagcagatgtgaaggaactgattaaaaagtgggagaaacaggtcagccaaaagaaaaagcaaaagaatgggaaaaaacatcaaaaaaagaaagttctgaaagttcgaaaatctcaacgttctcgtcaaaagaagactacaggaagcggacagtgtactaattatgctctcttgaaattggctggagatgttgagagcaaccctggacctgctcagtcactggctctgagcctccttatcctggttctggcctttggcatccccaggacccaaggcagtgatggaggggctcaggactgttgcctcaagtacagccaaaggaagattcccgccaaggttgtccgcagctaccggaagcaggaaccaagcttaggctgctccatcccagctatcctgttcttgccccgcaagcgctctcaggcagagctatgtgcagacccaaaggagctctgggtgcagcagctgatgcagcatctggacaagacaccatccccacagaaaccagcccagggcggaagcggagtgaaacagactttgaattttgaccttctcaagttggcgggagacgtggagtccaaccctggacctgccttgacctttgctttactggtggccctcctggtgctcagctgcaagtcaagctgctctgtgggctgtgatctgcctcaaacccacagcctgggtagcaggaggaccttgatgctcctggcacagatgaggagaatctctcttttctcctgcttgaaggacagacatgactttggatttccccaggaggagtttggcaaccagttccaaaaggctgaaaccatccctgtcctccatgagatgatccagcagatcttcaatctcttcagcacaaaggactcatctgctgcttgggatgagaccctcctagacaaattctacactgaactctaccagcagctgaatgacctggaagcctgtgtgatacagggggtgggggtgacagagactcccctgatgaaggaggactccattctggctgtgaggaaatacttccaaagaatcactctctatctgaaagagaagaaatacagcccttgtgcctgggaggttgtcagagcagaaatcatgagatctttttctttgtcaacaaacttgcaagaaagtttaagaagtaaggaataa

SEQ ID NO: 126 - DNA, 3624 bp, Artificial Sequence
  DNA sequence for the protein coding sequence of the NG-722 transgene cassette, including the stop codon
atgtgtcaccagcagttggtcatctcttggttttccctggtttttctggcatctcccctcgtggccatatgggaactgaagaaagatgtttatgtcgtagaattggattggtatccggatgcccctggagaaatggtggtcctcacctgtgacacccctgaagaagatggtatcacctggaccttggaccagagcagtgaggtcttaggctctggcaaaaccctgaccatccaagtcaaagagtttggagatgctggccagtacacctgtcacaaaggaggcgaggttctaagccattcgctcctgctgcttcacaaaaaggaagatggaatttggtccactgatattttaaaggaccagaaagaacccaaaaataagacctttctaagatgcgaggccaagaattattctggacgtttcacctgctggtggctgacgacaatcagtactgatttgacattcagtgtcaaaagcagcagaggctcttctgacccccaaggggtgacgtgcggagctgctacactctctgcagagagagtcagaggggacaacaaggagtatgagtactcagtggagtgccaggaggacagtgcctgcccagctgctgaggagagtctgcccattgaggtcatggtggatgccgttcacaagctcaagtatgaaaactacaccagcagcttcttcatcagggacatcatcaaacctgacccacccaagaacttgcagctgaagccattaaagaattctcggcaggtggaggtcagctgggagtaccctgacacctggagtactccacattcctacttctccctgacattctgcgttcaggtccagggcaagagcaagagagaaaagaaagatagagtcttcacggacaagacctcagccacggtcatctgccgcaaaaatgccagcattagcgtgcgggcccaggaccgctactatagctcatcttggagcgaatgggcatctgtgccctgcagtggagggggcggcagcgggggaggcggcagcggcggcgggggatcgagaaacctccccgtggccactccagacccaggaatgttcccatgccttcaccactcccaaaacctgctgagggccgtcagcaacatgctccagaaggccagacaaactctagaattttacccttgcacttctgaagagattgatcatgaagatatcacaaaagataaaaccagcacagtggaggcctgtttaccattggaattaaccaagaatgagagttgcctaaattccagagagacctctttcataactaatgggagttgcctggcctccagaaagacctcttttatgatggccctgtgccttagtagtatttatgaagacttgaagatgtaccaggtggagttcaagaccatgaatgcaaagcttctgatggatcctaagaggcagatctttctagatcaaaacatgctggcagttattgatgagctgatgcaggccctgaatttcaacagtgagactgtgccacaaaaatcctcccttgaagaaccggatttttataaaactaaaatcaagctctgcatacttcttcatgctttcagaattcgggcagtgactattgatagagtgatgagctatctgaatgcttccggaagcggagctactaacttcagcctgctgaagcaggctggagacgtggaggagaaccctggacctaagaaaagtggtgttcttttcctcttgggcatcatcttgctggttctgattggagtgcaaggaaccccagtagtgagaaagggtcgctgttcctgcatcagcaccaaccaagggactatccacctacaatccttgaaagaccttaaacaatttgccccaagcccttcctgcgagaaaattgaaatcattgctacactgaagaatggagttcaaacatgtctaaacccagattcagcagatgtgaaggaactgattaaaaagtgggagaaacaggtcagccaaaagaaaaagcaaaagaatgggaaaaaacatcaaaaaaagaaagttctgaaagttcgaaaatctcaacgttctcgtcaaaagaagactacaggaagcggacagtgtactaattatgctctcttgaaattggctggagatgttgagagcaaccctggacctgactggacctggcgcatcctgttcttggtggcagctgctacgggagctcattccaactgggtgaatgtaataagtgatttgaaaaaaattgaagatcttattcaatctatgcatattgatgctactttatatacggaaagtgatgttcaccccagttgcaaagtaacagcaatgaagtgctttctcttggagttacaagttatttcacttgagtccggagatgcaagtattcatgatacagtagaaaatctgatcatcctagcaaacaacagtttgtcttctaatgggaatgtaacagaatctggatgcaaagaatgtgaggaactggaggaaaaaaatattaaagaatttttgcagagttttgtacatattgtccaaatgttcatcaacacttctggaagcggagagggcagaggaagtctgctaacatgcggtgacgtcgaggagaatcctggacctgctcagtcactggctctgagcctccttatcctggttctggcctttggcatccccaggacccaaggcagtgatggaggggctcaggactgttgcctcaagtacagccaaaggaagattcccgccaaggttgtccgcagctaccggaagcaggaaccaagcttaggctgctccatcccagctatcctgttcttgccccgcaagcgctctcaggcagagctatgtgcagacccaaaggagctctgggtgcagcagctgatgcagcatctggacaagacaccatccccacagaaaccagcccagggctgcaggaaggacaggggggcctccaagactggcaagaaaggaaagggctccaaaggctgcaagaggactgagcggtcacagacccctaaagggccaggaagcggagtgaaacagactttgaattttgaccttctcaagttggcgggagacgtggagtccaaccctggacctgccttgacctttgctttactggtggccctcctggtgctcagctgcaagtcaagctgctctgtgggctgtgatctgcctcaaacccacagcctgggtagcaggaggaccttgatgctcctggcacagatgaggagaatctctcttttctcctgcttgaaggacagacatgactttggatttccccaggaggagtttggcaaccagttccaaaaggctgaaaccatccctgtcctccatgagatgatccagcagatcttcaatctcttcagcacaaaggactcatctgctgcttgggatgagaccctcctagacaaattctacactgaactctaccagcagctgaatgacctggaagcctgtgtgatacagggggtgggggtgacagagactcccctgatgaaggaggactccattctggctgtgaggaaatacttccaaagaatcactctctatctgaaagagaagaaatacagcccttgtgcctgggaggttgtcagagcagaaatcatgagatctttttctttgtcaacaaacttgcaagaaagtttaagaagtaaggaataa

SEQ ID NO: 127 - DNA, 3624 bp, Artificial Sequence
  DNA sequence for the protein coding sequence of the NG-723 transgene cassette, including the stop codon
atgtgtcaccagcagttggtcatctcttggttttccctggtttttctggcatctcccctcgtggccatatgggaactgaagaaagatgtttatgtcgtagaattggattggtatccggatgcccctggagaaatggtggtcctcacctgtgacacccctgaagaagatggtatcacctggaccttggaccagagcagtgaggtcttaggctctggcaaaaccctgaccatccaagtcaaagagtttggagatgctggccagtacacctgtcacaaaggaggcgaggttctaagccattcgctcctgctgcttcacaaaaaggaagatggaatttggtccactgatattttaaaggaccagaaagaacccaaaaataagacctttctaagatgcgaggccaagaattattctggacgtttcacctgctggtggctgacgacaatcagtactgatttgacattcagtgtcaaaagcagcagaggctcttctgacccccaaggggtgacgtgcggagctgctacactctctgcagagagagtcagaggggacaacaaggagtatgagtactcagtggagtgccaggaggacagtgcctgcccagctgctgaggagagtctgcccattgaggtcatggtggatgccgttcacaagctcaagtatgaaaactacaccagcagcttcttcatcagggacatcatcaaacctgacccacccaagaacttgcagctgaagccattaaagaattctcggcaggtggaggtcagctgggagtaccctgacacctggagtactccacattcctacttctccctgacattctgcgttcaggtccagggcaagagcaagagagaaaagaaagatagagtcttcacggacaagacctcagccacggtcatctgccgcaaaaatgccagcattagcgtgcgggcccaggaccgctactatagctcatcttggagcgaatgggcatctgtgccctgcagtggagggggcggcagcgggggaggcggcagcggcggcgggggatcgagaaacctccccgtggccactccagacccaggaatgttcccatgccttcaccactcccaaaacctgctgagggccgtcagcaacatgctccagaaggccagacaaactctagaattttacccttgcacttctgaagagattgatcatgaagatatcacaaaagataaaaccagcacagtggaggcctgtttaccattggaattaaccaagaatgagagttgcctaaattccagagagacctctttcataactaatgggagttgcctggcctccagaaagacctcttttatgatggccctgtgccttagtagtatttatgaagacttgaagatgtaccaggtggagttcaagaccatgaatgcaaagcttctgatggatcctaagaggcagatctttctagatcaaaacatgctggcagttattgatgagctgatgcaggccctgaatttcaacagtgagactgtgccacaaaaatcctcccttgaagaaccggatttttataaaactaaaatcaagctctgcatacttcttcatgctttcagaattcgggcagtgactattgatagagtgatgagctatctgaatgcttccggaagcggagctactaacttcagcctgctgaagcaggctggagacgtggaggagaaccctggacctaagaaaagtggtgttcttttcctcttgggcatcatcttgctggttctgattggagtgcaaggaaccccagtagtgagaaagggtcgctgttcctgcatcagcaccaaccaagggactatccacctacaatccttgaaagaccttaaacaatttgccccaagcccttcctgcgagaaaattgaaatcattgctacactgaagaatggagttcaaacatgtctaaacccagattcagcagatgtgaaggaactgattaaaaagtgggagaaacaggtcagccaaaagaaaaagcaaaagaatgggaaaaaacatcaaaaaaagaaagttctgaaagttcgaaaatctcaacgttctcgtcaaaagaagactacaggaagcggacagtgtactaattatgctctcttgaaattggctggagatgttgagagcaaccctggacctgactggacctggcgcatcctgttcttggtggcagctgctacgggagctcattccaactgggtgaatgtaataagtgatttgaaaaaaattgaagatcttattcaatctatgcatattgatgctactttatatacggaaagtgatgttcaccccagttgcaaagtaacagcaatgaagtgctttctcttggagttacaagttatttcacttgagtccggagatgcaagtattcatgatacagtagaaaatctgatcatcctagcaaacaacagtttgtcttctaatgggaatgtaacagaatctggatgcaaagaatgtgaggaactggaggaaaaaaatattaaagaatttttgcagagttttgtacatattgtccaaatgttcatcaacacttctggaagcggagagggcagaggaagtctgctaacatgcggtgacgtcgaggagaatcctggacctgccttgacctttgctttactggtggccctcctggtgctcagctgcaagtcaagctgctctgtgggctgtgatctgcctcaaacccacagcctgggtagcaggaggaccttgatgctcctggcacagatgaggagaatctctcttttctcctgcttgaaggacagacatgactttggatttccccaggaggagtttggcaaccagttccaaaaggctgaaaccatccctgtcctccatgagatgatccagcagatcttcaatctcttcagcacaaaggactcatctgctgcttgggatgagaccctcctagacaaattctacactgaactctaccagcagctgaatgacctggaagcctgtgtgatacagggggtgggggtgacagagactcccctgatgaaggaggactccattctggctgtgaggaaatacttccaaagaatcactctctatctgaaagagaagaaatacagcccttgtgcctgggaggttgtcagagcagaaatcatgagatctttttctttgtcaacaaacttgcaagaaagtttaagaagtaaggaaggaagcggagtgaaacagactttgaattttgaccttctcaagttggcgggagacgtggagtccaaccctggacctgctcagtcactggctctgagcctccttatcctggttctggcctttggcatccccaggacccaaggcagtgatggaggggctcaggactgttgcctcaagtacagccaaaggaagattcccgccaaggttgtccgcagctaccggaagcaggaaccaagcttaggctgctccatcccagctatcctgttcttgccccgcaagcgctctcaggcagagctatgtgcagacccaaaggagctctgggtgcagcagctgatgcagcatctggacaagacaccatccccacagaaaccagcccagggctgcaggaaggacaggggggcctccaagactggcaagaaaggaaagggctccaaaggctgcaagaggactgagcggtcacagacccctaaagggccataa

SEQ ID NO: 128 - DNA, 3528 bp, Artificial Sequence
  DNA sequence for the protein coding sequence of the NG-724 transgene cassette, including the stop codon
atgtgtcaccagcagttggtcatctcttggttttccctggtttttctggcatctcccctcgtggccatatgggaactgaagaaagatgtttatgtcgtagaattggattggtatccggatgcccctggagaaatggtggtcctcacctgtgacacccctgaagaagatggtatcacctggaccttggaccagagcagtgaggtcttaggctctggcaaaaccctgaccatccaagtcaaagagtttggagatgctggccagtacacctgtcacaaaggaggcgaggttctaagccattcgctcctgctgcttcacaaaaaggaagatggaatttggtccactgatattttaaaggaccagaaagaacccaaaaataagacctttctaagatgcgaggccaagaattattctggacgtttcacctgctggtggctgacgacaatcagtactgatttgacattcagtgtcaaaagcagcagaggctcttctgacccccaaggggtgacgtgcggagctgctacactctctgcagagagagtcagaggggacaacaaggagtatgagtactcagtggagtgccaggaggacagtgcctgcccagctgctgaggagagtctgcccattgaggtcatggtggatgccgttcacaagctcaagtatgaaaactacaccagcagcttcttcatcagggacatcatcaaacctgacccacccaagaacttgcagctgaagccattaaagaattctcggcaggtggaggtcagctgggagtaccctgacacctggagtactccacattcctacttctccctgacattctgcgttcaggtccagggcaagagcaagagagaaaagaaagatagagtcttcacggacaagacctcagccacggtcatctgccgcaaaaatgccagcattagcgtgcgggcccaggaccgctactatagctcatcttggagcgaatgggcatctgtgccctgcagtggagggggcggcagcgggggaggcggcagcggcggcgggggatcgagaaacctccccgtggccactccagacccaggaatgttcccatgccttcaccactcccaaaacctgctgagggccgtcagcaacatgctccagaaggccagacaaactctagaattttacccttgcacttctgaagagattgatcatgaagatatcacaaaagataaaaccagcacagtggaggcctgtttaccattggaattaaccaagaatgagagttgcctaaattccagagagacctctttcataactaatgggagttgcctggcctccagaaagacctcttttatgatggccctgtgccttagtagtatttatgaagacttgaagatgtaccaggtggagttcaagaccatgaatgcaaagcttctgatggatcctaagaggcagatctttctagatcaaaacatgctggcagttattgatgagctgatgcaggccctgaatttcaacagtgagactgtgccacaaaaatcctcccttgaagaaccggatttttataaaactaaaatcaagctctgcatacttcttcatgctttcagaattcgggcagtgactattgatagagtgatgagctatctgaatgcttccggaagcggagctactaacttcagcctgctgaagcaggctggagacgtggaggagaaccctggacctaagaaaagtggtgttcttttcctcttgggcatcatcttgctggttctgattggagtgcaaggaaccccagtagtgagaaagggtcgctgttcctgcatcagcaccaaccaagggactatccacctacaatccttgaaagaccttaaacaatttgccccaagcccttcctgcgagaaaattgaaatcattgctacactgaagaatggagttcaaacatgtctaaacccagattcagcagatgtgaaggaactgattaaaaagtgggagaaacaggtcagccaaaagaaaaagcaaaagaatgggaaaaaacatcaaaaaaagaaagttctgaaagttcgaaaatctcaacgttctcgtcaaaagaagactacaggaagcggacagtgtactaattatgctctcttgaaattggctggagatgttgagagcaaccctggacctgactggacctggcgcatcctgttcttggtggcagctgctacgggagctcattccaactgggtgaatgtaataagtgatttgaaaaaaattgaagatcttattcaatctatgcatattgatgctactttatatacggaaagtgatgttcaccccagttgcaaagtaacagcaatgaagtgctttctcttggagttacaagttatttcacttgagtccggagatgcaagtattcatgatacagtagaaaatctgatcatcctagcaaacaacagtttgtcttctaatgggaatgtaacagaatctggatgcaaagaatgtgaggaactggaggaaaaaaatattaaagaatttttgcagagttttgtacatattgtccaaatgttcatcaacacttctggaagcggagagggcagaggaagtctgctaacatgcggtgacgtcgaggagaatcctggacctgccttgacctttgctttactggtggccctcctggtgctcagctgcaagtcaagctgctctgtgggctgtgatctgcctcaaacccacagcctgggtagcaggaggaccttgatgctcctggcacagatgaggagaatctctcttttctcctgcttgaaggacagacatgactttggatttccccaggaggagtttggcaaccagttccaaaaggctgaaaccatccctgtcctccatgagatgatccagcagatcttcaatctcttcagcacaaaggactcatctgctgcttgggatgagaccctcctagacaaattctacactgaactctaccagcagctgaatgacctggaagcctgtgtgatacagggggtgggggtgacagagactcccctgatgaaggaggactccattctggctgtgaggaaatacttccaaagaatcactctctatctgaaagagaagaaatacagcccttgtgcctgggaggttgtcagagcagaaatcatgagatctttttctttgtcaacaaacttgcaagaaagtttaagaagtaaggaaggaagcggagtgaaacagactttgaattttgaccttctcaagttggcgggagacgtggagtccaaccctggacctgctcagtcactggctctgagcctccttatcctggttctggcctttggcatccccaggacccaaggcagtgatggaggggctcaggactgttgcctcaagtacagccaaaggaagattcccgccaaggttgtccgcagctaccggaagcaggaaccaagcttaggctgctccatcccagctatcctgttcttgccccgcaagcgctctcaggcagagctatgtgcagacccaaaggagctctgggtgcagcagctgatgcagcatctggacaagacaccatccccacagaaaccagcccagggctaa

SEQ ID NO: 129 - DNA, 3624 bp, Artificial Sequence
  DNA sequence for the protein coding sequence of the NG-725 transgene cassette, including the stop codon
atgtgtcaccagcagttggtcatctcttggttttccctggtttttctggcatctcccctcgtggccatatgggaactgaagaaagatgtttatgtcgtagaattggattggtatccggatgcccctggagaaatggtggtcctcacctgtgacacccctgaagaagatggtatcacctggaccttggaccagagcagtgaggtcttaggctctggcaaaaccctgaccatccaagtcaaagagtttggagatgctggccagtacacctgtcacaaaggaggcgaggttctaagccattcgctcctgctgcttcacaaaaaggaagatggaatttggtccactgatattttaaaggaccagaaagaacccaaaaataagacctttctaagatgcgaggccaagaattattctggacgtttcacctgctggtggctgacgacaatcagtactgatttgacattcagtgtcaaaagcagcagaggctcttctgacccccaaggggtgacgtgcggagctgctacactctctgcagagagagtcagaggggacaacaaggagtatgagtactcagtggagtgccaggaggacagtgcctgcccagctgctgaggagagtctgcccattgaggtcatggtggatgccgttcacaagctcaagtatgaaaactacaccagcagcttcttcatcagggacatcatcaaacctgacccacccaagaacttgcagctgaagccattaaagaattctcggcaggtggaggtcagctgggagtaccctgacacctggagtactccacattcctacttctccctgacattctgcgttcaggtccagggcaagagcaagagagaaaagaaagatagagtcttcacggacaagacctcagccacggtcatctgccgcaaaaatgccagcattagcgtgcgggcccaggaccgctactatagctcatcttggagcgaatgggcatctgtgccctgcagtggagggggcggcagcgggggaggcggcagcggcggcgggggatcgagaaacctccccgtggccactccagacccaggaatgttcccatgccttcaccactcccaaaacctgctgagggccgtcagcaacatgctccagaaggccagacaaactctagaattttacccttgcacttctgaagagattgatcatgaagatatcacaaaagataaaaccagcacagtggaggcctgtttaccattggaattaaccaagaatgagagttgcctaaattccagagagacctctttcataactaatgggagttgcctggcctccagaaagacctcttttatgatggccctgtgccttagtagtatttatgaagacttgaagatgtaccaggtggagttcaagaccatgaatgcaaagcttctgatggatcctaagaggcagatctttctagatcaaaacatgctggcagttattgatgagctgatgcaggccctgaatttcaacagtgagactgtgccacaaaaatcctcccttgaagaaccggatttttataaaactaaaatcaagctctgcatacttcttcatgctttcagaattcgggcagtgactattgatagagtgatgagctatctgaatgcttccggaagcggagctactaacttcagcctgctgaagcaggctggagacgtggaggagaaccctggacctgactggacctggcgcatcctgttcttggtggcagctgctacgggagctcattccaactgggtgaatgtaataagtgatttgaaaaaaattgaagatcttattcaatctatgcatattgatgctactttatatacggaaagtgatgttcaccccagttgcaaagtaacagcaatgaagtgctttctcttggagttacaagttatttcacttgagtccggagatgcaagtattcatgatacagtagaaaatctgatcatcctagcaaacaacagtttgtcttctaatgggaatgtaacagaatctggatgcaaagaatgtgaggaactggaggaaaaaaatattaaagaatttttgcagagttttgtacatattgtccaaatgttcatcaacacttctggaagcggacagtgtactaattatgctctcttgaaattggctggagatgttgagagcaaccctggacctgctcagtcactggctctgagcctccttatcctggttctggcctttggcatccccaggacccaaggcagtgatggaggggctcaggactgttgcctcaagtacagccaaaggaagattcccgccaaggttgtccgcagctaccggaagcaggaaccaagcttaggctgctccatcccagctatcctgttcttgccccgcaagcgctctcaggcagagctatgtgcagacccaaaggagctctgggtgcagcagctgatgcagcatctggacaagacaccatccccacagaaaccagcccagggctgcaggaaggacaggggggcctccaagactggcaagaaaggaaagggctccaaaggctgcaagaggactgagcggtcacagacccctaaagggccaggaagcggagtgaaacagactttgaattttgaccttctcaagttggcgggagacgtggagtccaaccctggacctaagaaaagtggtgttcttttcctcttgggcatcatcttgctggttctgattggagtgcaaggaaccccagtagtgagaaagggtcgctgttcctgcatcagcaccaaccaagggactatccacctacaatccttgaaagaccttaaacaatttgccccaagcccttcctgcgagaaaattgaaatcattgctacactgaagaatggagttcaaacatgtctaaacccagattcagcagatgtgaaggaactgattaaaaagtgggagaaacaggtcagccaaaagaaaaagcaaaagaatgggaaaaaacatcaaaaaaagaaagttctgaaagttcgaaaatctcaacgttctcgtcaaaagaagactacaggaagcggagagggcagaggaagtctgctaacatgcggtgacgtcgaggagaatcctggacctgccttgacctttgctttactggtggccctcctggtgctcagctgcaagtcaagctgctctgtgggctgtgatctgcctcaaacccacagcctgggtagcaggaggaccttgatgctcctggcacagatgaggagaatctctcttttctcctgcttgaaggacagacatgactttggatttccccaggaggagtttggcaaccagttccaaaaggctgaaaccatccctgtcctccatgagatgatccagcagatcttcaatctcttcagcacaaaggactcatctgctgcttgggatgagaccctcctagacaaattctacactgaactctaccagcagctgaatgacctggaagcctgtgtgatacagggggtgggggtgacagagactcccctgatgaaggaggactccattctggctgtgaggaaatacttccaaagaatcactctctatctgaaagagaagaaatacagcccttgtgcctgggaggttgtcagagcagaaatcatgagatctttttctttgtcaacaaacttgcaagaaagtttaagaagtaaggaataa

SEQ ID NO: 130 - DNA, 3624 bp, Artificial Sequence
  DNA sequence for the protein coding sequence of the NG-726 transgene cassette, including the stop codon
atggctcagtcactggctctgagcctccttatcctggttctggcctttggcatccccaggacccaaggcagtgatggaggggctcaggactgttgcctcaagtacagccaaaggaagattcccgccaaggttgtccgcagctaccggaagcaggaaccaagcttaggctgctccatcccagctatcctgttcttgccccgcaagcgctctcaggcagagctatgtgcagacccaaaggagctctgggtgcagcagctgatgcagcatctggacaagacaccatccccacagaaaccagcccagggctgcaggaaggacaggggggcctccaagactggcaagaaaggaaagggctccaaaggctgcaagaggactgagcggtcacagacccctaaagggccaggaagcggacagtgtactaattatgctctcttgaaattggctggagatgttgagagcaaccctggacctgactggacctggcgcatcctgttcttggtggcagctgctacgggagctcattccaactgggtgaatgtaataagtgatttgaaaaaaattgaagatcttattcaatctatgcatattgatgctactttatatacggaaagtgatgttcaccccagttgcaaagtaacagcaatgaagtgctttctcttggagttacaagttatttcacttgagtccggagatgcaagtattcatgatacagtagaaaatctgatcatcctagcaaacaacagtttgtcttctaatgggaatgtaacagaatctggatgcaaagaatgtgaggaactggaggaaaaaaatattaaagaatttttgcagagttttgtacatattgtccaaatgttcatcaacacttctggaagcggagtgaaacagactttgaattttgaccttctcaagttggcgggagacgtggagtccaaccctggaccttgtcaccagcagttggtcatctcttggttttccctggtttttctggcatctcccctcgtggccatatgggaactgaagaaagatgtttatgtcgtagaattggattggtatccggatgcccctggagaaatggtggtcctcacctgtgacacccctgaagaagatggtatcacctggaccttggaccagagcagtgaggtcttaggctctggcaaaaccctgaccatccaagtcaaagagtttggagatgctggccagtacacctgtcacaaaggaggcgaggttctaagccattcgctcctgctgcttcacaaaaaggaagatggaatttggtccactgatattttaaaggaccagaaagaacccaaaaataagacctttctaagatgcgaggccaagaattattctggacgtttcacctgctggtggctgacgacaatcagtactgatttgacattcagtgtcaaaagcagcagaggctcttctgacccccaaggggtgacgtgcggagctgctacactctctgcagagagagtcagaggggacaacaaggagtatgagtactcagtggagtgccaggaggacagtgcctgcccagctgctgaggagagtctgcccattgaggtcatggtggatgccgttcacaagctcaagtatgaaaactacaccagcagcttcttcatcagggacatcatcaaacctgacccacccaagaacttgcagctgaagccattaaagaattctcggcaggtggaggtcagctgggagtaccctgacacctggagtactccacattcctacttctccctgacattctgcgttcaggtccagggcaagagcaagagagaaaagaaagatagagtcttcacggacaagacctcagccacggtcatctgccgcaaaaatgccagcattagcgtgcgggcccaggaccgctactatagctcatcttggagcgaatgggcatctgtgccctgcagtggagggggcggcagcgggggaggcggcagcggcggcgggggatcgagaaacctccccgtggccactccagacccaggaatgttcccatgccttcaccactcccaaaacctgctgagggccgtcagcaacatgctccagaaggccagacaaactctagaattttacccttgcacttctgaagagattgatcatgaagatatcacaaaagataaaaccagcacagtggaggcctgtttaccattggaattaaccaagaatgagagttgcctaaattccagagagacctctttcataactaatgggagttgcctggcctccagaaagacctcttttatgatggccctgtgccttagtagtatttatgaagacttgaagatgtaccaggtggagttcaagaccatgaatgcaaagcttctgatggatcctaagaggcagatctttctagatcaaaacatgctggcagttattgatgagctgatgcaggccctgaatttcaacagtgagactgtgccacaaaaatcctcccttgaagaaccggatttttataaaactaaaatcaagctctgcatacttcttcatgctttcagaattcgggcagtgactattgatagagtgatgagctatctgaatgcttccggaagcggagagggcagaggaagtctgctaacatgcggtgacgtcgaggagaatcctggacctaagaaaagtggtgttcttttcctcttgggcatcatcttgctggttctgattggagtgcaaggaaccccagtagtgagaaagggtcgctgttcctgcatcagcaccaaccaagggactatccacctacaatccttgaaagaccttaaacaatttgccccaagcccttcctgcgagaaaattgaaatcattgctacactgaagaatggagttcaaacatgtctaaacccagattcagcagatgtgaaggaactgattaaaaagtgggagaaacaggtcagccaaaagaaaaagcaaaagaatgggaaaaaacatcaaaaaaagaaagttctgaaagttcgaaaatctcaacgttctcgtcaaaagaagactacaggaagcggagctactaacttcagcctgctgaagcaggctggagacgtggaggagaaccctggacctgccttgacctttgctttactggtggccctcctggtgctcagctgcaagtcaagctgctctgtgggctgtgatctgcctcaaacccacagcctgggtagcaggaggaccttgatgctcctggcacagatgaggagaatctctcttttctcctgcttgaaggacagacatgactttggatttccccaggaggagtttggcaaccagttccaaaaggctgaaaccatccctgtcctccatgagatgatccagcagatcttcaatctcttcagcacaaaggactcatctgctgcttgggatgagaccctcctagacaaattctacactgaactctaccagcagctgaatgacctggaagcctgtgtgatacagggggtgggggtgacagagactcccctgatgaaggaggactccattctggctgtgaggaaatacttccaaagaatcactctctatctgaaagagaagaaatacagcccttgtgcctgggaggttgtcagagcagaaatcatgagatctttttctttgtcaacaaacttgcaagaaagtttaagaagtaaggaataa

SEQ ID NO: 131 - DNA, 930 bp, Artificial Sequence
  DNA sequence for the protein coding sequence of the NG-740 transgene cassette, including the stop codon
atggccccgcggcgggcgcgcggctgccggaccctcggtctcccggcgctgctactgctgctgctgctccggccgccggcgacgcggggcatcacgtgccctccccccatgtccgtggaacacgcagacatctgggtcaagagctacagcttgtactccagggagcggtacatttgtaactctggtttcaagcgtaaagccggcacgtccagcctgacggagtgcgtgttgaacaaggccacgaatgtcgcccactggacaacccccagtctcaaatgcattagagacgaacaaaaactcatctcagaagaggatctggctgtgggccaggacacgcaggaggtcatcgtggtgccacactccttgccctttaaggtggtggtgatctcagccatcctggccctggtggtgctcaccatcatctcccttatcatcctcatcatgctttggcagaagaagccacgtggaagcggagctactaacttcagcctgctgaagcaggctggagacgtggaggagaaccctggacctgactggacctggcgcatcctgttcttggtggcagctgctacgggagctcattccaactgggtgaatgtaataagtgatttgaaaaaaattgaagatcttattcaatctatgcatattgatgctactttatatacggaaagtgatgttcaccccagttgcaaagtaacagcaatgaagtgctttctcttggagttacaagttatttcacttgagtccggagatgcaagtattcatgatacagtagaaaatctgatcatcctagcaaacaacagtttgtcttctaatgggaatgtaacagaatctggatgcaaagaatgtgaggaactggaggaaaaaaatattaaagaatttttgcagagttttgtacatattgtccaaatgttcatcaacacttcttaa

SEQ ID NO: 132 - DNA, 915 bp, Artificial Sequence
  DNA sequence for the protein coding sequence of the NG-742 transgene cassette, including the stop codon
atggccccgcggcgggcgcgcggctgccggaccctcggtctcccggcgctgctactgctgctgctgctccggccgccggcgacgcggggcatcacgtgccctccccccatgtccgtggaacacgcagacatctgggtcaagagctacagcttgtactccagggagcggtacatttgtaactctggtttcaagcgtaaagccggcacgtccagcctgacggagtgcgtgttgaacaaggccacgaatgtcgcccactggacaacccccagtctcaaatgcattagagacggaggcggcggttcagctgtgggccaggacacgcaggaggtcatcgtggtgccacactccttgccctttaaggtggtggtgatctcagccatcctggccctggtggtgctcaccatcatctcccttatcatcctcatcatgctttggcagaagaagccacgtggaagcggagctactaacttcagcctgctgaagcaggctggagacgtggaggagaaccctggacctgactggacctggcgcatcctgttcttggtggcagctgctacgggagctcattccaactgggtgaatgtaataagtgatttgaaaaaaattgaagatcttattcaatctatgcatattgatgctactttatatacggaaagtgatgttcaccccagttgcaaagtaacagcaatgaagtgctttctcttggagttacaagttatttcacttgagtccggagatgcaagtattcatgatacagtagaaaatctgatcatcctagcaaacaacagtttgtcttctaatgggaatgtaacagaatctggatgcaaagaatgtgaggaactggaggaaaaaaatattaaagaatttttgcagagttttgtacatattgtccaaatgttcatcaacacttcttaa

SEQ ID NO: 133 - DNA, 453 bp, Artificial Sequence
  DNA sequence for the protein coding sequence of the NG-744 transgene cassette, including the stop codon
atggccccgcggcgggcgcgcggctgccggaccctcggtctcccggcgctgctactgctgctgctgctccggccgccggcgacgcggggcatcacgtgccctccccccatgtccgtggaacacgcagacatctgggtcaagagctacagcttgtactccagggagcggtacatttgtaactctggtttcaagcgtaaagccggcacgtccagcctgacggagtgcgtgttgaacaaggccacgaatgtcgcccactggacaacccccagtctcaaatgcattagagacggaggcggcggttcagctgtgggccaggacacgcaggaggtcatcgtggtgccacactccttgccctttaaggtggtggtgatctcagccatcctggccctggtggtgctcaccatcatctcccttatcatcctcatcatgctttggcagaagaagccacgttaa

SEQ ID NO: 134 - DNA, 468 bp, Artificial Sequence
  DNA sequence for the protein coding sequence of the NG-746 transgene cassette, including the stop codon
atggccccgcggcgggcgcgcggctgccggaccctcggtctcccggcgctgctactgctgctgctgctccggccgccggcgacgcggggcatcacgtgccctccccccatgtccgtggaacacgcagacatctgggtcaagagctacagcttgtactccagggagcggtacatttgtaactctggtttcaagcgtaaagccggcacgtccagcctgacggagtgcgtgttgaacaaggccacgaatgtcgcccactggacaacccccagtctcaaatgcattagagacgaacaaaaactcatctcagaagaggatctggctgtgggccaggacacgcaggaggtcatcgtggtgccacactccttgccctttaaggtggtggtgatctcagccatcctggccctggtggtgctcaccatcatctcccttatcatcctcatcatgctttggcagaagaagccacgttaa

SEQ ID NO: 135 - DNA, 3627 bp, Artificial Sequence
  DNA sequence for the protein coding sequence of the NG-750 transgene cassette, including the stop codon
atggctcagtcactggctctgagcctccttatcctggttctggcctttggcatccccaggacccaaggcagtgatggaggggctcaggactgttgcctcaagtacagccaaaggaagattcccgccaaggttgtccgcagctaccggaagcaggaaccaagcttaggctgctccatcccagctatcctgttcttgccccgcaagcgctctcaggcagagctatgtgcagacccaaaggagctctgggtgcagcagctgatgcagcatctggacaagacaccatccccacagaaaccagcccagggctgcaggaaggacaggggggcctccaagactggcaagaaaggaaagggctccaaaggctgcaagaggactgagcggtcacagacccctaaagggccaggaagcggagctactaacttcagcctgctgaagcaggctggagacgtggaggagaaccctggacctgactggacctggcgcatcctgttcttggtggcagctgctacgggagctcattccaactgggtgaatgtaataagtgatttgaaaaaaattgaagatcttattcaatctatgcatattgatgctactttatatacggaaagtgatgttcaccccagttgcaaagtaacagcaatgaagtgctttctcttggagttacaagttatttcacttgagtccggagatgcaagtattcatgatacagtagaaaatctgatcatcctagcaaacaacagtttgtcttctaatgggaatgtaacagaatctggatgcaaagaatgtgaggaactggaggaaaaaaatattaaagaatttttgcagagttttgtacatattgtccaaatgttcatcaacacttctggaagcggagagggcagaggaagtctgctaacatgcggtgacgtcgaggagaatcctggacctgccttgacctttgctttactggtggccctcctggtgctcagctgcaagtcaagctgctctgtgggctgtgatctgcctcaaacccacagcctgggtagcaggaggaccttgatgctcctggcacagatgaggagaatctctcttttctcctgcttgaaggacagacatgactttggatttccccaggaggagtttggcaaccagttccaaaaggctgaaaccatccctgtcctccatgagatgatccagcagatcttcaatctcttcagcacaaaggactcatctgctgcttgggatgagaccctcctagacaaattctacactgaactctaccagcagctgaatgacctggaagcctgtgtgatacagggggtgggggtgacagagactcccctgatgaaggaggactccattctggctgtgaggaaatacttccaaagaatcactctctatctgaaagagaagaaatacagcccttgtgcctgggaggttgtcagagcagaaatcatgagatctttttctttgtcaacaaacttgcaagaaagtttaagaagtaaggaaggaagcggacagtgtactaattatgctctcttgaaattggctggagatgttgagagcaaccctggacctaagaaaagtggtgttcttttcctcttgggcatcatcttgctggttctgattggagtgcaaggaaccccagtagtgagaaagggtcgctgttcctgcatcagcaccaaccaagggactatccacctacaatccttgaaagaccttaaacaatttgccccaagcccttcctgcgagaaaattgaaatcattgctacactgaagaatggagttcaaacatgtctaaacccagattcagcagatgtgaaggaactgattaaaaagtgggagaaacaggtcagccaaaagaaaaagcaaaagaatgggaaaaaacatcaaaaaaagaaagttctgaaagttcgaaaatctcaacgttctcgtcaaaagaagactacaggaagcggagtgaaacagactttgaattttgaccttctcaagttggcgggagacgtggagtccaaccctggacctatgtgtcaccagcagttggtcatctcttggttttccctggtttttctggcatctcccctcgtggccatatgggaactgaagaaagatgtttatgtcgtagaattggattggtatccggatgcccctggagaaatggtggtcctcacctgtgacacccctgaagaagatggtatcacctggaccttggaccagagcagtgaggtcttaggctctggcaaaaccctgaccatccaagtcaaagagtttggagatgctggccagtacacctgtcacaaaggaggcgaggttctaagccattcgctcctgctgcttcacaaaaaggaagatggaatttggtccactgatattttaaaggaccagaaagaacccaaaaataagacctttctaagatgcgaggccaagaattattctggacgtttcacctgctggtggctgacgacaatcagtactgatttgacattcagtgtcaaaagcagcagaggctcttctgacccccaaggggtgacgtgcggagctgctacactctctgcagagagagtcagaggggacaacaaggagtatgagtactcagtggagtgccaggaggacagtgcctgcccagctgctgaggagagtctgcccattgaggtcatggtggatgccgttcacaagctcaagtatgaaaactacaccagcagcttcttcatcagggacatcatcaaacctgacccacccaagaacttgcagctgaagccattaaagaattctcggcaggtggaggtcagctgggagtaccctgacacctggagtactccacattcctacttctccctgacattctgcgttcaggtccagggcaagagcaagagagaaaagaaagatagagtcttcacggacaagacctcagccacggtcatctgccgcaaaaatgccagcattagcgtgcgggcccaggaccgctactatagctcatcttggagcgaatgggcatctgtgccctgcagtggagggggcggcagcgggggaggcggcagcggcggcgggggatcgagaaacctccccgtggccactccagacccaggaatgttcccatgccttcaccactcccaaaacctgctgagggccgtcagcaacatgctccagaaggccagacaaactctagaattttacccttgcacttctgaagagattgatcatgaagatatcacaaaagataaaaccagcacagtggaggcctgtttaccattggaattaaccaagaatgagagttgcctaaattccagagagacctctttcataactaatgggagttgcctggcctccagaaagacctcttttatgatggccctgtgccttagtagtatttatgaagacttgaagatgtaccaggtggagttcaagaccatgaatgcaaagcttctgatggatcctaagaggcagatctttctagatcaaaacatgctggcagttattgatgagctgatgcaggccctgaatttcaacagtgagactgtgccacaaaaatcctcccttgaagaaccggatttttataaaactaaaatcaagctctgcatacttcttcatgctttcagaattcgggcagtgactattgatagagtgatgagctatctgaatgcttcctaa

SEQ ID NO: 136 - DNA, 3627 bp, Artificial Sequence
  DNA sequence for the protein coding sequence of the NG-751 transgene cassette, including the stop codon
atggactggacctggcgcatcctgttcttggtggcagctgctacgggagctcattccaactgggtgaatgtaataagtgatttgaaaaaaattgaagatcttattcaatctatgcatattgatgctactttatatacggaaagtgatgttcaccccagttgcaaagtaacagcaatgaagtgctttctcttggagttacaagttatttcacttgagtccggagatgcaagtattcatgatacagtagaaaatctgatcatcctagcaaacaacagtttgtcttctaatgggaatgtaacagaatctggatgcaaagaatgtgaggaactggaggaaaaaaatattaaagaatttttgcagagttttgtacatattgtccaaatgttcatcaacacttctggaagcggagctactaacttcagcctgctgaagcaggctggagacgtggaggagaaccctggacctgctcagtcactggctctgagcctccttatcctggttctggcctttggcatccccaggacccaaggcagtgatggaggggctcaggactgttgcctcaagtacagccaaaggaagattcccgccaaggttgtccgcagctaccggaagcaggaaccaagcttaggctgctccatcccagctatcctgttcttgccccgcaagcgctctcaggcagagctatgtgcagacccaaaggagctctgggtgcagcagctgatgcagcatctggacaagacaccatccccacagaaaccagcccagggctgcaggaaggacaggggggcctccaagactggcaagaaaggaaagggctccaaaggctgcaagaggactgagcggtcacagacccctaaagggccaggaagcggagagggcagaggaagtctgctaacatgcggtgacgtcgaggagaatcctggacctgccttgacctttgctttactggtggccctcctggtgctcagctgcaagtcaagctgctctgtgggctgtgatctgcctcaaacccacagcctgggtagcaggaggaccttgatgctcctggcacagatgaggagaatctctcttttctcctgcttgaaggacagacatgactttggatttccccaggaggagtttggcaaccagttccaaaaggctgaaaccatccctgtcctccatgagatgatccagcagatcttcaatctcttcagcacaaaggactcatctgctgcttgggatgagaccctcctagacaaattctacactgaactctaccagcagctgaatgacctggaagcctgtgtgatacagggggtgggggtgacagagactcccctgatgaaggaggactccattctggctgtgaggaaatacttccaaagaatcactctctatctgaaagagaagaaatacagcccttgtgcctgggaggttgtcagagcagaaatcatgagatctttttctttgtcaacaaacttgcaagaaagtttaagaagtaaggaaggaagcggacagtgtactaattatgctctcttgaaattggctggagatgttgagagcaaccctggacctaagaaaagtggtgttcttttcctcttgggcatcatcttgctggttctgattggagtgcaaggaaccccagtagtgagaaagggtcgctgttcctgcatcagcaccaaccaagggactatccacctacaatccttgaaagaccttaaacaatttgccccaagcccttcctgcgagaaaattgaaatcattgctacactgaagaatggagttcaaacatgtctaaacccagattcagcagatgtgaaggaactgattaaaaagtgggagaaacaggtcagccaaaagaaaaagcaaaagaatgggaaaaaacatcaaaaaaagaaagttctgaaagttcgaaaatctcaacgttctcgtcaaaagaagactacaggaagcggagtgaaacagactttgaattttgaccttctcaagttggcgggagacgtggagtccaaccctggacctatgtgtcaccagcagttggtcatctcttggttttccctggtttttctggcatctcccctcgtggccatatgggaactgaagaaagatgtttatgtcgtagaattggattggtatccggatgcccctggagaaatggtggtcctcacctgtgacacccctgaagaagatggtatcacctggaccttggaccagagcagtgaggtcttaggctctggcaaaaccctgaccatccaagtcaaagagtttggagatgctggccagtacacctgtcacaaaggaggcgaggttctaagccattcgctcctgctgcttcacaaaaaggaagatggaatttggtccactgatattttaaaggaccagaaagaacccaaaaataagacctttctaagatgcgaggccaagaattattctggacgtttcacctgctggtggctgacgacaatcagtactgatttgacattcagtgtcaaaagcagcagaggctcttctgacccccaaggggtgacgtgcggagctgctacactctctgcagagagagtcagaggggacaacaaggagtatgagtactcagtggagtgccaggaggacagtgcctgcccagctgctgaggagagtctgcccattgaggtcatggtggatgccgttcacaagctcaagtatgaaaactacaccagcagcttcttcatcagggacatcatcaaacctgacccacccaagaacttgcagctgaagccattaaagaattctcggcaggtggaggtcagctgggagtaccctgacacctggagtactccacattcctacttctccctgacattctgcgttcaggtccagggcaagagcaagagagaaaagaaagatagagtcttcacggacaagacctcagccacggtcatctgccgcaaaaatgccagcattagcgtgcgggcccaggaccgctactatagctcatcttggagcgaatgggcatctgtgccctgcagtggagggggcggcagcgggggaggcggcagcggcggcgggggatcgagaaacctccccgtggccactccagacccaggaatgttcccatgccttcaccactcccaaaacctgctgagggccgtcagcaacatgctccagaaggccagacaaactctagaattttacccttgcacttctgaagagattgatcatgaagatatcacaaaagataaaaccagcacagtggaggcctgtttaccattggaattaaccaagaatgagagttgcctaaattccagagagacctctttcataactaatgggagttgcctggcctccagaaagacctcttttatgatggccctgtgccttagtagtatttatgaagacttgaagatgtaccaggtggagttcaagaccatgaatgcaaagcttctgatggatcctaagaggcagatctttctagatcaaaacatgctggcagttattgatgagctgatgcaggccctgaatttcaacagtgagactgtgccacaaaaatcctcccttgaagaaccggatttttataaaactaaaatcaagctctgcatacttcttcatgctttcagaattcgggcagtgactattgatagagtgatgagctatctgaatgcttcctaa

SEQ ID NO: 137 - DNA, 3627 bp, Artificial Sequence
  DNA sequence for the protein coding sequence of the NG-752 transgene cassette, including the stop codon
atggctcagtcactggctctgagcctccttatcctggttctggcctttggcatccccaggacccaaggcagtgatggaggggctcaggactgttgcctcaagtacagccaaaggaagattcccgccaaggttgtccgcagctaccggaagcaggaaccaagcttaggctgctccatcccagctatcctgttcttgccccgcaagcgctctcaggcagagctatgtgcagacccaaaggagctctgggtgcagcagctgatgcagcatctggacaagacaccatccccacagaaaccagcccagggctgcaggaaggacaggggggcctccaagactggcaagaaaggaaagggctccaaaggctgcaagaggactgagcggtcacagacccctaaagggccaggaagcggagagggcagaggaagtctgctaacatgcggtgacgtcgaggagaatcctggacctgactggacctggcgcatcctgttcttggtggcagctgctacgggagctcattccaactgggtgaatgtaataagtgatttgaaaaaaattgaagatcttattcaatctatgcatattgatgctactttatatacggaaagtgatgttcaccccagttgcaaagtaacagcaatgaagtgctttctcttggagttacaagttatttcacttgagtccggagatgcaagtattcatgatacagtagaaaatctgatcatcctagcaaacaacagtttgtcttctaatgggaatgtaacagaatctggatgcaaagaatgtgaggaactggaggaaaaaaatattaaagaatttttgcagagttttgtacatattgtccaaatgttcatcaacacttctggaagcggagctactaacttcagcctgctgaagcaggctggagacgtggaggagaaccctggacctgccttgacctttgctttactggtggccctcctggtgctcagctgcaagtcaagctgctctgtgggctgtgatctgcctcaaacccacagcctgggtagcaggaggaccttgatgctcctggcacagatgaggagaatctctcttttctcctgcttgaaggacagacatgactttggatttccccaggaggagtttggcaaccagttccaaaaggctgaaaccatccctgtcctccatgagatgatccagcagatcttcaatctcttcagcacaaaggactcatctgctgcttgggatgagaccctcctagacaaattctacactgaactctaccagcagctgaatgacctggaagcctgtgtgatacagggggtgggggtgacagagactcccctgatgaaggaggactccattctggctgtgaggaaatacttccaaagaatcactctctatctgaaagagaagaaatacagcccttgtgcctgggaggttgtcagagcagaaatcatgagatctttttctttgtcaacaaacttgcaagaaagtttaagaagtaaggaaggaagcggacagtgtactaattatgctctcttgaaattggctggagatgttgagagcaaccctggacctaagaaaagtggtgttcttttcctcttgggcatcatcttgctggttctgattggagtgcaaggaaccccagtagtgagaaagggtcgctgttcctgcatcagcaccaaccaagggactatccacctacaatccttgaaagaccttaaacaatttgccccaagcccttcctgcgagaaaattgaaatcattgctacactgaagaatggagttcaaacatgtctaaacccagattcagcagatgtgaaggaactgattaaaaagtgggagaaacaggtcagccaaaagaaaaagcaaaagaatgggaaaaaacatcaaaaaaagaaagttctgaaagttcgaaaatctcaacgttctcgtcaaaagaagactacaggaagcggagtgaaacagactttgaattttgaccttctcaagttggcgggagacgtggagtccaaccctggacctatgtgtcaccagcagttggtcatctcttggttttccctggtttttctggcatctcccctcgtggccatatgggaactgaagaaagatgtttatgtcgtagaattggattggtatccggatgcccctggagaaatggtggtcctcacctgtgacacccctgaagaagatggtatcacctggaccttggaccagagcagtgaggtcttaggctctggcaaaaccctgaccatccaagtcaaagagtttggagatgctggccagtacacctgtcacaaaggaggcgaggttctaagccattcgctcctgctgcttcacaaaaaggaagatggaatttggtccactgatattttaaaggaccagaaagaacccaaaaataagacctttctaagatgcgaggccaagaattattctggacgtttcacctgctggtggctgacgacaatcagtactgatttgacattcagtgtcaaaagcagcagaggctcttctgacccccaaggggtgacgtgcggagctgctacactctctgcagagagagtcagaggggacaacaaggagtatgagtactcagtggagtgccaggaggacagtgcctgcccagctgctgaggagagtctgcccattgaggtcatggtggatgccgttcacaagctcaagtatgaaaactacaccagcagcttcttcatcagggacatcatcaaacctgacccacccaagaacttgcagctgaagccattaaagaattctcggcaggtggaggtcagctgggagtaccctgacacctggagtactccacattcctacttctccctgacattctgcgttcaggtccagggcaagagcaagagagaaaagaaagatagagtcttcacggacaagacctcagccacggtcatctgccgcaaaaatgccagcattagcgtgcgggcccaggaccgctactatagctcatcttggagcgaatgggcatctgtgccctgcagtggagggggcggcagcgggggaggcggcagcggcggcgggggatcgagaaacctccccgtggccactccagacccaggaatgttcccatgccttcaccactcccaaaacctgctgagggccgtcagcaacatgctccagaaggccagacaaactctagaattttacccttgcacttctgaagagattgatcatgaagatatcacaaaagataaaaccagcacagtggaggcctgtttaccattggaattaaccaagaatgagagttgcctaaattccagagagacctctttcataactaatgggagttgcctggcctccagaaagacctcttttatgatggccctgtgccttagtagtatttatgaagacttgaagatgtaccaggtggagttcaagaccatgaatgcaaagcttctgatggatcctaagaggcagatctttctagatcaaaacatgctggcagttattgatgagctgatgcaggccctgaatttcaacagtgagactgtgccacaaaaatcctcccttgaagaaccggatttttataaaactaaaatcaagctctgcatacttcttcatgctttcagaattcgggcagtgactattgatagagtgatgagctatctgaatgcttcctaa

SEQ ID NO: 138 - DNA, 3627 bp, Artificial Sequence
  DNA sequence for the protein coding sequence of the NG-753 transgene cassette, including the stop codon
atggactggacctggcgcatcctgttcttggtggcagctgctacgggagctcattccaactgggtgaatgtaataagtgatttgaaaaaaattgaagatcttattcaatctatgcatattgatgctactttatatacggaaagtgatgttcaccccagttgcaaagtaacagcaatgaagtgctttctcttggagttacaagttatttcacttgagtccggagatgcaagtattcatgatacagtagaaaatctgatcatcctagcaaacaacagtttgtcttctaatgggaatgtaacagaatctggatgcaaagaatgtgaggaactggaggaaaaaaatattaaagaatttttgcagagttttgtacatattgtccaaatgttcatcaacacttctggaagcggagagggcagaggaagtctgctaacatgcggtgacgtcgaggagaatcctggacctgctcagtcactggctctgagcctccttatcctggttctggcctttggcatccccaggacccaaggcagtgatggaggggctcaggactgttgcctcaagtacagccaaaggaagattcccgccaaggttgtccgcagctaccggaagcaggaaccaagcttaggctgctccatcccagctatcctgttcttgccccgcaagcgctctcaggcagagctatgtgcagacccaaaggagctctgggtgcagcagctgatgcagcatctggacaagacaccatccccacagaaaccagcccagggctgcaggaaggacaggggggcctccaagactggcaagaaaggaaagggctccaaaggctgcaagaggactgagcggtcacagacccctaaagggccaggaagcggagctactaacttcagcctgctgaagcaggctggagacgtggaggagaaccctggacctgccttgacctttgctttactggtggccctcctggtgctcagctgcaagtcaagctgctctgtgggctgtgatctgcctcaaacccacagcctgggtagcaggaggaccttgatgctcctggcacagatgaggagaatctctcttttctcctgcttgaaggacagacatgactttggatttccccaggaggagtttggcaaccagttccaaaaggctgaaaccatccctgtcctccatgagatgatccagcagatcttcaatctcttcagcacaaaggactcatctgctgcttgggatgagaccctcctagacaaattctacactgaactctaccagcagctgaatgacctggaagcctgtgtgatacagggggtgggggtgacagagactcccctgatgaaggaggactccattctggctgtgaggaaatacttccaaagaatcactctctatctgaaagagaagaaatacagcccttgtgcctgggaggttgtcagagcagaaatcatgagatctttttctttgtcaacaaacttgcaagaaagtttaagaagtaaggaaggaagcggacagtgtactaattatgctctcttgaaattggctggagatgttgagagcaaccctggacctaagaaaagtggtgttcttttcctcttgggcatcatcttgctggttctgattggagtgcaaggaaccccagtagtgagaaagggtcgctgttcctgcatcagcaccaaccaagggactatccacctacaatccttgaaagaccttaaacaatttgccccaagcccttcctgcgagaaaattgaaatcattgctacactgaagaatggagttcaaacatgtctaaacccagattcagcagatgtgaaggaactgattaaaaagtgggagaaacaggtcagccaaaagaaaaagcaaaagaatgggaaaaaacatcaaaaaaagaaagttctgaaagttcgaaaatctcaacgttctcgtcaaaagaagactacaggaagcggagtgaaacagactttgaattttgaccttctcaagttggcgggagacgtggagtccaaccctggacctatgtgtcaccagcagttggtcatctcttggttttccctggtttttctggcatctcccctcgtggccatatgggaactgaagaaagatgtttatgtcgtagaattggattggtatccggatgcccctggagaaatggtggtcctcacctgtgacacccctgaagaagatggtatcacctggaccttggaccagagcagtgaggtcttaggctctggcaaaaccctgaccatccaagtcaaagagtttggagatgctggccagtacacctgtcacaaaggaggcgaggttctaagccattcgctcctgctgcttcacaaaaaggaagatggaatttggtccactgatattttaaaggaccagaaagaacccaaaaataagacctttctaagatgcgaggccaagaattattctggacgtttcacctgctggtggctgacgacaatcagtactgatttgacattcagtgtcaaaagcagcagaggctcttctgacccccaaggggtgacgtgcggagctgctacactctctgcagagagagtcagaggggacaacaaggagtatgagtactcagtggagtgccaggaggacagtgcctgcccagctgctgaggagagtctgcccattgaggtcatggtggatgccgttcacaagctcaagtatgaaaactacaccagcagcttcttcatcagggacatcatcaaacctgacccacccaagaacttgcagctgaagccattaaagaattctcggcaggtggaggtcagctgggagtaccctgacacctggagtactccacattcctacttctccctgacattctgcgttcaggtccagggcaagagcaagagagaaaagaaagatagagtcttcacggacaagacctcagccacggtcatctgccgcaaaaatgccagcattagcgtgcgggcccaggaccgctactatagctcatcttggagcgaatgggcatctgtgccctgcagtggagggggcggcagcgggggaggcggcagcggcggcgggggatcgagaaacctccccgtggccactccagacccaggaatgttcccatgccttcaccactcccaaaacctgctgagggccgtcagcaacatgctccagaaggccagacaaactctagaattttacccttgcacttctgaagagattgatcatgaagatatcacaaaagataaaaccagcacagtggaggcctgtttaccattggaattaaccaagaatgagagttgcctaaattccagagagacctctttcataactaatgggagttgcctggcctccagaaagacctcttttatgatggccctgtgccttagtagtatttatgaagacttgaagatgtaccaggtggagttcaagaccatgaatgcaaagcttctgatggatcctaagaggcagatctttctagatcaaaacatgctggcagttattgatgagctgatgcaggccctgaatttcaacagtgagactgtgccacaaaaatcctcccttgaagaaccggatttttataaaactaaaatcaagctctgcatacttcttcatgctttcagaattcgggcagtgactattgatagagtgatgagctatctgaatgcttcctaa

SEQ ID NO: 139 - DNA, 3627 bp, Artificial Sequence
  DNA sequence for the protein coding sequence of the NG-754 transgene cassette, including the stop codon
atgaagaaaagtggtgttcttttcctcttgggcatcatcttgctggttctgattggagtgcaaggaaccccagtagtgagaaagggtcgctgttcctgcatcagcaccaaccaagggactatccacctacaatccttgaaagaccttaaacaatttgccccaagcccttcctgcgagaaaattgaaatcattgctacactgaagaatggagttcaaacatgtctaaacccagattcagcagatgtgaaggaactgattaaaaagtgggagaaacaggtcagccaaaagaaaaagcaaaagaatgggaaaaaacatcaaaaaaagaaagttctgaaagttcgaaaatctcaacgttctcgtcaaaagaagactacaggaagcggagagggcagaggaagtctgctaacatgcggtgacgtcgaggagaatcctggacctgctcagtcactggctctgagcctccttatcctggttctggcctttggcatccccaggacccaaggcagtgatggaggggctcaggactgttgcctcaagtacagccaaaggaagattcccgccaaggttgtccgcagctaccggaagcaggaaccaagcttaggctgctccatcccagctatcctgttcttgccccgcaagcgctctcaggcagagctatgtgcagacccaaaggagctctgggtgcagcagctgatgcagcatctggacaagacaccatccccacagaaaccagcccagggctgcaggaaggacaggggggcctccaagactggcaagaaaggaaagggctccaaaggctgcaagaggactgagcggtcacagacccctaaagggccaggaagcggagctactaacttcagcctgctgaagcaggctggagacgtggaggagaaccctggacctgccttgacctttgctttactggtggccctcctggtgctcagctgcaagtcaagctgctctgtgggctgtgatctgcctcaaacccacagcctgggtagcaggaggaccttgatgctcctggcacagatgaggagaatctctcttttctcctgcttgaaggacagacatgactttggatttccccaggaggagtttggcaaccagttccaaaaggctgaaaccatccctgtcctccatgagatgatccagcagatcttcaatctcttcagcacaaaggactcatctgctgcttgggatgagaccctcctagacaaattctacactgaactctaccagcagctgaatgacctggaagcctgtgtgatacagggggtgggggtgacagagactcccctgatgaaggaggactccattctggctgtgaggaaatacttccaaagaatcactctctatctgaaagagaagaaatacagcccttgtgcctgggaggttgtcagagcagaaatcatgagatctttttctttgtcaacaaacttgcaagaaagtttaagaagtaaggaaggaagcggacagtgtactaattatgctctcttgaaattggctggagatgttgagagcaaccctggacctgactggacctggcgcatcctgttcttggtggcagctgctacgggagctcattccaactgggtgaatgtaataagtgatttgaaaaaaattgaagatcttattcaatctatgcatattgatgctactttatatacggaaagtgatgttcaccccagttgcaaagtaacagcaatgaagtgctttctcttggagttacaagttatttcacttgagtccggagatgcaagtattcatgatacagtagaaaatctgatcatcctagcaaacaacagtttgtcttctaatgggaatgtaacagaatctggatgcaaagaatgtgaggaactggaggaaaaaaatattaaagaatttttgcagagttttgtacatattgtccaaatgttcatcaacacttctggaagcggagtgaaacagactttgaattttgaccttctcaagttggcgggagacgtggagtccaaccctggacctatgtgtcaccagcagttggtcatctcttggttttccctggtttttctggcatctcccctcgtggccatatgggaactgaagaaagatgtttatgtcgtagaattggattggtatccggatgcccctggagaaatggtggtcctcacctgtgacacccctgaagaagatggtatcacctggaccttggaccagagcagtgaggtcttaggctctggcaaaaccctgaccatccaagtcaaagagtttggagatgctggccagtacacctgtcacaaaggaggcgaggttctaagccattcgctcctgctgcttcacaaaaaggaagatggaatttggtccactgatattttaaaggaccagaaagaacccaaaaataagacctttctaagatgcgaggccaagaattattctggacgtttcacctgctggtggctgacgacaatcagtactgatttgacattcagtgtcaaaagcagcagaggctcttctgacccccaaggggtgacgtgcggagctgctacactctctgcagagagagtcagaggggacaacaaggagtatgagtactcagtggagtgccaggaggacagtgcctgcccagctgctgaggagagtctgcccattgaggtcatggtggatgccgttcacaagctcaagtatgaaaactacaccagcagcttcttcatcagggacatcatcaaacctgacccacccaagaacttgcagctgaagccattaaagaattctcggcaggtggaggtcagctgggagtaccctgacacctggagtactccacattcctacttctccctgacattctgcgttcaggtccagggcaagagcaagagagaaaagaaagatagagtcttcacggacaagacctcagccacggtcatctgccgcaaaaatgccagcattagcgtgcgggcccaggaccgctactatagctcatcttggagcgaatgggcatctgtgccctgcagtggagggggcggcagcgggggaggcggcagcggcggcgggggatcgagaaacctccccgtggccactccagacccaggaatgttcccatgccttcaccactcccaaaacctgctgagggccgtcagcaacatgctccagaaggccagacaaactctagaattttacccttgcacttctgaagagattgatcatgaagatatcacaaaagataaaaccagcacagtggaggcctgtttaccattggaattaaccaagaatgagagttgcctaaattccagagagacctctttcataactaatgggagttgcctggcctccagaaagacctcttttatgatggccctgtgccttagtagtatttatgaagacttgaagatgtaccaggtggagttcaagaccatgaatgcaaagcttctgatggatcctaagaggcagatctttctagatcaaaacatgctggcagttattgatgagctgatgcaggccctgaatttcaacagtgagactgtgccacaaaaatcctcccttgaagaaccggatttttataaaactaaaatcaagctctgcatacttcttcatgctttcagaattcgggcagtgactattgatagagtgatgagctatctgaatgcttcctaa

SEQ ID NO: 140 - DNA, 3165 bp, Artificial Sequence
  DNA sequence for the protein coding sequence of the NG-755 transgene cassette, including the stop codon
atggactggacctggcgcatcctgttcttggtggcagctgctacgggagctcattccaactgggtgaatgtaataagtgatttgaaaaaaattgaagatcttattcaatctatgcatattgatgctactttatatacggaaagtgatgttcaccccagttgcaaagtaacagcaatgaagtgctttctcttggagttacaagttatttcacttgagtccggagatgcaagtattcatgatacagtagaaaatctgatcatcctagcaaacaacagtttgtcttctaatgggaatgtaacagaatctggatgcaaagaatgtgaggaactggaggaaaaaaatattaaagaatttttgcagagttttgtacatattgtccaaatgttcatcaacacttctggaagcggagctactaacttcagcctgctgaagcaggctggagacgtggaggagaaccctggacctgccttgacctttgctttactggtggccctcctggtgctcagctgcaagtcaagctgctctgtgggctgtgatctgcctcaaacccacagcctgggtagcaggaggaccttgatgctcctggcacagatgaggagaatctctcttttctcctgcttgaaggacagacatgactttggatttccccaggaggagtttggcaaccagttccaaaaggctgaaaccatccctgtcctccatgagatgatccagcagatcttcaatctcttcagcacaaaggactcatctgctgcttgggatgagaccctcctagacaaattctacactgaactctaccagcagctgaatgacctggaagcctgtgtgatacagggggtgggggtgacagagactcccctgatgaaggaggactccattctggctgtgaggaaatacttccaaagaatcactctctatctgaaagagaagaaatacagcccttgtgcctgggaggttgtcagagcagaaatcatgagatctttttctttgtcaacaaacttgcaagaaagtttaagaagtaaggaaggaagcggacagtgtactaattatgctctcttgaaattggctggagatgttgagagcaaccctggacctaagaaaagtggtgttcttttcctcttgggcatcatcttgctggttctgattggagtgcaaggaaccccagtagtgagaaagggtcgctgttcctgcatcagcaccaaccaagggactatccacctacaatccttgaaagaccttaaacaatttgccccaagcccttcctgcgagaaaattgaaatcattgctacactgaagaatggagttcaaacatgtctaaacccagattcagcagatgtgaaggaactgattaaaaagtgggagaaacaggtcagccaaaagaaaaagcaaaagaatgggaaaaaacatcaaaaaaagaaagttctgaaagttcgaaaatctcaacgttctcgtcaaaagaagactacaggaagcggagtgaaacagactttgaattttgaccttctcaagttggcgggagacgtggagtccaaccctggacctatgtgtcaccagcagttggtcatctcttggttttccctggtttttctggcatctcccctcgtggccatatgggaactgaagaaagatgtttatgtcgtagaattggattggtatccggatgcccctggagaaatggtggtcctcacctgtgacacccctgaagaagatggtatcacctggaccttggaccagagcagtgaggtcttaggctctggcaaaaccctgaccatccaagtcaaagagtttggagatgctggccagtacacctgtcacaaaggaggcgaggttctaagccattcgctcctgctgcttcacaaaaaggaagatggaatttggtccactgatattttaaaggaccagaaagaacccaaaaataagacctttctaagatgcgaggccaagaattattctggacgtttcacctgctggtggctgacgacaatcagtactgatttgacattcagtgtcaaaagcagcagaggctcttctgacccccaaggggtgacgtgcggagctgctacactctctgcagagagagtcagaggggacaacaaggagtatgagtactcagtggagtgccaggaggacagtgcctgcccagctgctgaggagagtctgcccattgaggtcatggtggatgccgttcacaagctcaagtatgaaaactacaccagcagcttcttcatcagggacatcatcaaacctgacccacccaagaacttgcagctgaagccattaaagaattctcggcaggtggaggtcagctgggagtaccctgacacctggagtactccacattcctacttctccctgacattctgcgttcaggtccagggcaagagcaagagagaaaagaaagatagagtcttcacggacaagacctcagccacggtcatctgccgcaaaaatgccagcattagcgtgcgggcccaggaccgctactatagctcatcttggagcgaatgggcatctgtgccctgcagtggagggggcggcagcgggggaggcggcagcggcggcgggggatcgagaaacctccccgtggccactccagacccaggaatgttcccatgccttcaccactcccaaaacctgctgagggccgtcagcaacatgctccagaaggccagacaaactctagaattttacccttgcacttctgaagagattgatcatgaagatatcacaaaagataaaaccagcacagtggaggcctgtttaccattggaattaaccaagaatgagagttgcctaaattccagagagacctctttcataactaatgggagttgcctggcctccagaaagacctcttttatgatggccctgtgccttagtagtatttatgaagacttgaagatgtaccaggtggagttcaagaccatgaatgcaaagcttctgatggatcctaagaggcagatctttctagatcaaaacatgctggcagttattgatgagctgatgcaggccctgaatttcaacagtgagactgtgccacaaaaatcctcccttgaagaaccggatttttataaaactaaaatcaagctctgcatacttcttcatgctttcagaattcgggcagtgactattgatagagtgatgagctatctgaatgcttcctaa

SEQ ID NO: 141 - DNA, 3162 bp, Artificial Sequence
  DNA sequence for the protein coding sequence of the NG-756 transgene cassette, including the stop codon
atggactggacctggcgcatcctgttcttggtggcagctgctacgggagctcattccaactgggtgaatgtaataagtgatttgaaaaaaattgaagatcttattcaatctatgcatattgatgctactttatatacggaaagtgatgttcaccccagttgcaaagtaacagcaatgaagtgctttctcttggagttacaagttatttcacttgagtccggagatgcaagtattcatgatacagtagaaaatctgatcatcctagcaaacaacagtttgtcttctaatgggaatgtaacagaatctggatgcaaagaatgtgaggaactggaggaaaaaaatattaaagaatttttgcagagttttgtacatattgtccaaatgttcatcaacacttctggaagcggagagggcagaggaagtctgctaacatgcggtgacgtcgaggagaatcctggacctgccttgacctttgctttactggtggccctcctggtgctcagctgcaagtcaagctgctctgtgggctgtgatctgcctcaaacccacagcctgggtagcaggaggaccttgatgctcctggcacagatgaggagaatctctcttttctcctgcttgaaggacagacatgactttggatttccccaggaggagtttggcaaccagttccaaaaggctgaaaccatccctgtcctccatgagatgatccagcagatcttcaatctcttcagcacaaaggactcatctgctgcttgggatgagaccctcctagacaaattctacactgaactctaccagcagctgaatgacctggaagcctgtgtgatacagggggtgggggtgacagagactcccctgatgaaggaggactccattctggctgtgaggaaatacttccaaagaatcactctctatctgaaagagaagaaatacagcccttgtgcctgggaggttgtcagagcagaaatcatgagatctttttctttgtcaacaaacttgcaagaaagtttaagaagtaaggaaggaagcggacagtgtactaattatgctctcttgaaattggctggagatgttgagagcaaccctggacctaagaaaagtggtgttcttttcctcttgggcatcatcttgctggttctgattggagtgcaaggaaccccagtagtgagaaagggtcgctgttcctgcatcagcaccaaccaagggactatccacctacaatccttgaaagaccttaaacaatttgccccaagcccttcctgcgagaaaattgaaatcattgctacactgaagaatggagttcaaacatgtctaaacccagattcagcagatgtgaaggaactgattaaaaagtgggagaaacaggtcagccaaaagaaaaagcaaaagaatgggaaaaaacatcaaaaaaagaaagttctgaaagttcgaaaatctcaacgttctcgtcaaaagaagactacaggaagcggagtgaaacagactttgaattttgaccttctcaagttggcgggagacgtggagtccaaccctggacctatgtgtcaccagcagttggtcatctcttggttttccctggtttttctggcatctcccctcgtggccatatgggaactgaagaaagatgtttatgtcgtagaattggattggtatccggatgcccctggagaaatggtggtcctcacctgtgacacccctgaagaagatggtatcacctggaccttggaccagagcagtgaggtcttaggctctggcaaaaccctgaccatccaagtcaaagagtttggagatgctggccagtacacctgtcacaaaggaggcgaggttctaagccattcgctcctgctgcttcacaaaaaggaagatggaatttggtccactgatattttaaaggaccagaaagaacccaaaaataagacctttctaagatgcgaggccaagaattattctggacgtttcacctgctggtggctgacgacaatcagtactgatttgacattcagtgtcaaaagcagcagaggctcttctgacccccaaggggtgacgtgcggagctgctacactctctgcagagagagtcagaggggacaacaaggagtatgagtactcagtggagtgccaggaggacagtgcctgcccagctgctgaggagagtctgcccattgaggtcatggtggatgccgttcacaagctcaagtatgaaaactacaccagcagcttcttcatcagggacatcatcaaacctgacccacccaagaacttgcagctgaagccattaaagaattctcggcaggtggaggtcagctgggagtaccctgacacctggagtactccacattcctacttctccctgacattctgcgttcaggtccagggcaagagcaagagagaaaagaaagatagagtcttcacggacaagacctcagccacggtcatctgccgcaaaaatgccagcattagcgtgcgggcccaggaccgctactatagctcatcttggagcgaatgggcatctgtgccctgcagtggagggggcggcagcgggggaggcggcagcggcggcgggggatcgagaaacctccccgtggccactccagacccaggaatgttcccatgccttcaccactcccaaaacctgctgagggccgtcagcaacatgctccagaaggccagacaaactctagaattttacccttgcacttctgaagagattgatcatgaagatatcacaaaagataaaaccagcacagtggaggcctgtttaccattggaattaaccaagaatgagagttgcctaaattccagagagacctctttcataactaatgggagttgcctggcctccagaaagacctcttttatgatggccctgtgccttagtagtatttatgaagacttgaagatgtaccaggtggagttcaagaccatgaatgcaaagcttctgatggatcctaagaggcagatctttctagatcaaaacatgctggcagttattgatgagctgatgcaggccctgaatttcaacagtgagactgtgccacaaaaatcctcccttgaagaaccggatttttataaaactaaaatcaagctctgcatacttcttcatgctttcagaattcgggcagtgactattgatagagtgatgagctatctgaatgcttcctaa

SEQ ID NO: 142 - DNA, 3162 bp, Artificial Sequence
  DNA sequence for the protein coding sequence of the NG-757 transgene cassette, including the stop codon
atgaagaaaagtggtgttcttttcctcttgggcatcatcttgctggttctgattggagtgcaaggaaccccagtagtgagaaagggtcgctgttcctgcatcagcaccaaccaagggactatccacctacaatccttgaaagaccttaaacaatttgccccaagcccttcctgcgagaaaattgaaatcattgctacactgaagaatggagttcaaacatgtctaaacccagattcagcagatgtgaaggaactgattaaaaagtgggagaaacaggtcagccaaaagaaaaagcaaaagaatgggaaaaaacatcaaaaaaagaaagttctgaaagttcgaaaatctcaacgttctcgtcaaaagaagactacaggaagcggagtgaaacagactttgaattttgaccttctcaagttggcgggagacgtggagtccaaccctggacctgccttgacctttgctttactggtggccctcctggtgctcagctgcaagtcaagctgctctgtgggctgtgatctgcctcaaacccacagcctgggtagcaggaggaccttgatgctcctggcacagatgaggagaatctctcttttctcctgcttgaaggacagacatgactttggatttccccaggaggagtttggcaaccagttccaaaaggctgaaaccatccctgtcctccatgagatgatccagcagatcttcaatctcttcagcacaaaggactcatctgctgcttgggatgagaccctcctagacaaattctacactgaactctaccagcagctgaatgacctggaagcctgtgtgatacagggggtgggggtgacagagactcccctgatgaaggaggactccattctggctgtgaggaaatacttccaaagaatcactctctatctgaaagagaagaaatacagcccttgtgcctgggaggttgtcagagcagaaatcatgagatctttttctttgtcaacaaacttgcaagaaagtttaagaagtaaggaaggaagcggacagtgtactaattatgctctcttgaaattggctggagatgttgagagcaaccctggacctgactggacctggcgcatcctgttcttggtggcagctgctacgggagctcattccaactgggtgaatgtaataagtgatttgaaaaaaattgaagatcttattcaatctatgcatattgatgctactttatatacggaaagtgatgttcaccccagttgcaaagtaacagcaatgaagtgctttctcttggagttacaagttatttcacttgagtccggagatgcaagtattcatgatacagtagaaaatctgatcatcctagcaaacaacagtttgtcttctaatgggaatgtaacagaatctggatgcaaagaatgtgaggaactggaggaaaaaaatattaaagaatttttgcagagttttgtacatattgtccaaatgttcatcaacacttctggaagcggagagggcagaggaagtctgctaacatgcggtgacgtcgaggagaatcctggacctatgtgtcaccagcagttggtcatctcttggttttccctggtttttctggcatctcccctcgtggccatatgggaactgaagaaagatgtttatgtcgtagaattggattggtatccggatgcccctggagaaatggtggtcctcacctgtgacacccctgaagaagatggtatcacctggaccttggaccagagcagtgaggtcttaggctctggcaaaaccctgaccatccaagtcaaagagtttggagatgctggccagtacacctgtcacaaaggaggcgaggttctaagccattcgctcctgctgcttcacaaaaaggaagatggaatttggtccactgatattttaaaggaccagaaagaacccaaaaataagacctttctaagatgcgaggccaagaattattctggacgtttcacctgctggtggctgacgacaatcagtactgatttgacattcagtgtcaaaagcagcagaggctcttctgacccccaaggggtgacgtgcggagctgctacactctctgcagagagagtcagaggggacaacaaggagtatgagtactcagtggagtgccaggaggacagtgcctgcccagctgctgaggagagtctgcccattgaggtcatggtggatgccgttcacaagctcaagtatgaaaactacaccagcagcttcttcatcagggacatcatcaaacctgacccacccaagaacttgcagctgaagccattaaagaattctcggcaggtggaggtcagctgggagtaccctgacacctggagtactccacattcctacttctccctgacattctgcgttcaggtccagggcaagagcaagagagaaaagaaagatagagtcttcacggacaagacctcagccacggtcatctgccgcaaaaatgccagcattagcgtgcgggcccaggaccgctactatagctcatcttggagcgaatgggcatctgtgccctgcagtggagggggcggcagcgggggaggcggcagcggcggcgggggatcgagaaacctccccgtggccactccagacccaggaatgttcccatgccttcaccactcccaaaacctgctgagggccgtcagcaacatgctccagaaggccagacaaactctagaattttacccttgcacttctgaagagattgatcatgaagatatcacaaaagataaaaccagcacagtggaggcctgtttaccattggaattaaccaagaatgagagttgcctaaattccagagagacctctttcataactaatgggagttgcctggcctccagaaagacctcttttatgatggccctgtgccttagtagtatttatgaagacttgaagatgtaccaggtggagttcaagaccatgaatgcaaagcttctgatggatcctaagaggcagatctttctagatcaaaacatgctggcagttattgatgagctgatgcaggccctgaatttcaacagtgagactgtgccacaaaaatcctcccttgaagaaccggatttttataaaactaaaatcaagctctgcatacttcttcatgctttcagaattcgggcagtgactattgatagagtgatgagctatctgaatgcttcctaa

SEQ ID NO: 143 - DNA, 3165 bp, Artificial Sequence
  DNA sequence for the protein coding sequence of the NG-758 transgene cassette, including the stop codon
atgaagaaaagtggtgttcttttcctcttgggcatcatcttgctggttctgattggagtgcaaggaaccccagtagtgagaaagggtcgctgttcctgcatcagcaccaaccaagggactatccacctacaatccttgaaagaccttaaacaatttgccccaagcccttcctgcgagaaaattgaaatcattgctacactgaagaatggagttcaaacatgtctaaacccagattcagcagatgtgaaggaactgattaaaaagtgggagaaacaggtcagccaaaagaaaaagcaaaagaatgggaaaaaacatcaaaaaaagaaagttctgaaagttcgaaaatctcaacgttctcgtcaaaagaagactacaggaagcggagtgaaacagactttgaattttgaccttctcaagttggcgggagacgtggagtccaaccctggacctgccttgacctttgctttactggtggccctcctggtgctcagctgcaagtcaagctgctctgtgggctgtgatctgcctcaaacccacagcctgggtagcaggaggaccttgatgctcctggcacagatgaggagaatctctcttttctcctgcttgaaggacagacatgactttggatttccccaggaggagtttggcaaccagttccaaaaggctgaaaccatccctgtcctccatgagatgatccagcagatcttcaatctcttcagcacaaaggactcatctgctgcttgggatgagaccctcctagacaaattctacactgaactctaccagcagctgaatgacctggaagcctgtgtgatacagggggtgggggtgacagagactcccctgatgaaggaggactccattctggctgtgaggaaatacttccaaagaatcactctctatctgaaagagaagaaatacagcccttgtgcctgggaggttgtcagagcagaaatcatgagatctttttctttgtcaacaaacttgcaagaaagtttaagaagtaaggaaggaagcggacagtgtactaattatgctctcttgaaattggctggagatgttgagagcaaccctggacctgactggacctggcgcatcctgttcttggtggcagctgctacgggagctcattccaactgggtgaatgtaataagtgatttgaaaaaaattgaagatcttattcaatctatgcatattgatgctactttatatacggaaagtgatgttcaccccagttgcaaagtaacagcaatgaagtgctttctcttggagttacaagttatttcacttgagtccggagatgcaagtattcatgatacagtagaaaatctgatcatcctagcaaacaacagtttgtcttctaatgggaatgtaacagaatctggatgcaaagaatgtgaggaactggaggaaaaaaatattaaagaatttttgcagagttttgtacatattgtccaaatgttcatcaacacttctggaagcggagctactaacttcagcctgctgaagcaggctggagacgtggaggagaaccctggacctatgtgtcaccagcagttggtcatctcttggttttccctggtttttctggcatctcccctcgtggccatatgggaactgaagaaagatgtttatgtcgtagaattggattggtatccggatgcccctggagaaatggtggtcctcacctgtgacacccctgaagaagatggtatcacctggaccttggaccagagcagtgaggtcttaggctctggcaaaaccctgaccatccaagtcaaagagtttggagatgctggccagtacacctgtcacaaaggaggcgaggttctaagccattcgctcctgctgcttcacaaaaaggaagatggaatttggtccactgatattttaaaggaccagaaagaacccaaaaataagacctttctaagatgcgaggccaagaattattctggacgtttcacctgctggtggctgacgacaatcagtactgatttgacattcagtgtcaaaagcagcagaggctcttctgacccccaaggggtgacgtgcggagctgctacactctctgcagagagagtcagaggggacaacaaggagtatgagtactcagtggagtgccaggaggacagtgcctgcccagctgctgaggagagtctgcccattgaggtcatggtggatgccgttcacaagctcaagtatgaaaactacaccagcagcttcttcatcagggacatcatcaaacctgacccacccaagaacttgcagctgaagccattaaagaattctcggcaggtggaggtcagctgggagtaccctgacacctggagtactccacattcctacttctccctgacattctgcgttcaggtccagggcaagagcaagagagaaaagaaagatagagtcttcacggacaagacctcagccacggtcatctgccgcaaaaatgccagcattagcgtgcgggcccaggaccgctactatagctcatcttggagcgaatgggcatctgtgccctgcagtggagggggcggcagcgggggaggcggcagcggcggcgggggatcgagaaacctccccgtggccactccagacccaggaatgttcccatgccttcaccactcccaaaacctgctgagggccgtcagcaacatgctccagaaggccagacaaactctagaattttacccttgcacttctgaagagattgatcatgaagatatcacaaaagataaaaccagcacagtggaggcctgtttaccattggaattaaccaagaatgagagttgcctaaattccagagagacctctttcataactaatgggagttgcctggcctccagaaagacctcttttatgatggccctgtgccttagtagtatttatgaagacttgaagatgtaccaggtggagttcaagaccatgaatgcaaagcttctgatggatcctaagaggcagatctttctagatcaaaacatgctggcagttattgatgagctgatgcaggccctgaatttcaacagtgagactgtgccacaaaaatcctcccttgaagaaccggatttttataaaactaaaatcaagctctgcatacttcttcatgctttcagaattcgggcagtgactattgatagagtgatgagctatctgaatgcttcctaa

SEQ ID NO: 144 - DNA, 3159 bp, Artificial Sequence
  DNA sequence for the protein coding sequence of the NG-759 transgene cassette, including the stop codon
atgtgtcaccagcagttggtcatctcttggttttccctggtttttctggcatctcccctcgtggccatatgggaactgaagaaagatgtttatgtcgtagaattggattggtatccggatgcccctggagaaatggtggtcctcacctgtgacacccctgaagaagatggtatcacctggaccttggaccagagcagtgaggtcttaggctctggcaaaaccctgaccatccaagtcaaagagtttggagatgctggccagtacacctgtcacaaaggaggcgaggttctaagccattcgctcctgctgcttcacaaaaaggaagatggaatttggtccactgatattttaaaggaccagaaagaacccaaaaataagacctttctaagatgcgaggccaagaattattctggacgtttcacctgctggtggctgacgacaatcagtactgatttgacattcagtgtcaaaagcagcagaggctcttctgacccccaaggggtgacgtgcggagctgctacactctctgcagagagagtcagaggggacaacaaggagtatgagtactcagtggagtgccaggaggacagtgcctgcccagctgctgaggagagtctgcccattgaggtcatggtggatgccgttcacaagctcaagtatgaaaactacaccagcagcttcttcatcagggacatcatcaaacctgacccacccaagaacttgcagctgaagccattaaagaattctcggcaggtggaggtcagctgggagtaccctgacacctggagtactccacattcctacttctccctgacattctgcgttcaggtccagggcaagagcaagagagaaaagaaagatagagtcttcacggacaagacctcagccacggtcatctgccgcaaaaatgccagcattagcgtgcgggcccaggaccgctactatagctcatcttggagcgaatgggcatctgtgccctgcagtggagggggcggcagcgggggaggcggcagcggcggcgggggatcgagaaacctccccgtggccactccagacccaggaatgttcccatgccttcaccactcccaaaacctgctgagggccgtcagcaacatgctccagaaggccagacaaactctagaattttacccttgcacttctgaagagattgatcatgaagatatcacaaaagataaaaccagcacagtggaggcctgtttaccattggaattaaccaagaatgagagttgcctaaattccagagagacctctttcataactaatgggagttgcctggcctccagaaagacctcttttatgatggccctgtgccttagtagtatttatgaagacttgaagatgtaccaggtggagttcaagaccatgaatgcaaagcttctgatggatcctaagaggcagatctttctagatcaaaacatgctggcagttattgatgagctgatgcaggccctgaatttcaacagtgagactgtgccacaaaaatcctcccttgaagaaccggatttttataaaactaaaatcaagctctgcatacttcttcatgctttcagaattcgggcagtgactattgatagagtgatgagctatctgaatgcttccggaagcggagagggcagaggaagtctgctaacatgcggtgacgtcgaggagaatcctggacctaagaaaagtggtgttcttttcctcttgggcatcatcttgctggttctgattggagtgcaaggaaccccagtagtgagaaagggtcgctgttcctgcatcagcaccaaccaagggactatccacctacaatccttgaaagaccttaaacaatttgccccaagcccttcctgcgagaaaattgaaatcattgctacactgaagaatggagttcaaacatgtctaaacccagattcagcagatgtgaaggaactgattaaaaagtgggagaaacaggtcagccaaaagaaaaagcaaaagaatgggaaaaaacatcaaaaaaagaaagttctgaaagttcgaaaatctcaacgttctcgtcaaaagaagactacaggaagcggagtgaaacagactttgaattttgaccttctcaagttggcgggagacgtggagtccaaccctggacctgccttgacctttgctttactggtggccctcctggtgctcagctgcaagtcaagctgctctgtgggctgtgatctgcctcaaacccacagcctgggtagcaggaggaccttgatgctcctggcacagatgaggagaatctctcttttctcctgcttgaaggacagacatgactttggatttccccaggaggagtttggcaaccagttccaaaaggctgaaaccatccctgtcctccatgagatgatccagcagatcttcaatctcttcagcacaaaggactcatctgctgcttgggatgagaccctcctagacaaattctacactgaactctaccagcagctgaatgacctggaagcctgtgtgatacagggggtgggggtgacagagactcccctgatgaaggaggactccattctggctgtgaggaaatacttccaaagaatcactctctatctgaaagagaagaaatacagcccttgtgcctgggaggttgtcagagcagaaatcatgagatctttttctttgtcaacaaacttgcaagaaagtttaagaagtaaggaaggaagcggacagtgtactaattatgctctcttgaaattggctggagatgttgagagcaaccctggacctgactggacctggcgcatcctgttcttggtggcagctgctacgggagctcattccaactgggtgaatgtaataagtgatttgaaaaaaattgaagatcttattcaatctatgcatattgatgctactttatatacggaaagtgatgttcaccccagttgcaaagtaacagcaatgaagtgctttctcttggagttacaagttatttcacttgagtccggagatgcaagtattcatgatacagtagaaaatctgatcatcctagcaaacaacagtttgtcttctaatgggaatgtaacagaatctggatgcaaagaatgtgaggaactggaggaaaaaaatattaaagaatttttgcagagttttgtacatattgtccaaatgttcatcaacacttcttaa

SEQ ID NO: 145 - DNA, 3627 bp, Artificial Sequence
  DNA sequence for the protein coding sequence of the NG-760 transgene cassette, including the stop codon
atggccttgacctttgctttactggtggccctcctggtgctcagctgcaagtcaagctgctctgtgggctgtgatctgcctcaaacccacagcctgggtagcaggaggaccttgatgctcctggcacagatgaggagaatctctcttttctcctgcttgaaggacagacatgactttggatttccccaggaggagtttggcaaccagttccaaaaggctgaaaccatccctgtcctccatgagatgatccagcagatcttcaatctcttcagcacaaaggactcatctgctgcttgggatgagaccctcctagacaaattctacactgaactctaccagcagctgaatgacctggaagcctgtgtgatacagggggtgggggtgacagagactcccctgatgaaggaggactccattctggctgtgaggaaatacttccaaagaatcactctctatctgaaagagaagaaatacagcccttgtgcctgggaggttgtcagagcagaaatcatgagatctttttctttgtcaacaaacttgcaagaaagtttaagaagtaaggaaggaagcggacagtgtactaattatgctctcttgaaattggctggagatgttgagagcaaccctggacctgctcagtcactggctctgagcctccttatcctggttctggcctttggcatccccaggacccaaggcagtgatggaggggctcaggactgttgcctcaagtacagccaaaggaagattcccgccaaggttgtccgcagctaccggaagcaggaaccaagcttaggctgctccatcccagctatcctgttcttgccccgcaagcgctctcaggcagagctatgtgcagacccaaaggagctctgggtgcagcagctgatgcagcatctggacaagacaccatccccacagaaaccagcccagggctgcaggaaggacaggggggcctccaagactggcaagaaaggaaagggctccaaaggctgcaagaggactgagcggtcacagacccctaaagggccaggaagcggagagggcagaggaagtctgctaacatgcggtgacgtcgaggagaatcctggacctgactggacctggcgcatcctgttcttggtggcagctgctacgggagctcattccaactgggtgaatgtaataagtgatttgaaaaaaattgaagatcttattcaatctatgcatattgatgctactttatatacggaaagtgatgttcaccccagttgcaaagtaacagcaatgaagtgctttctcttggagttacaagttatttcacttgagtccggagatgcaagtattcatgatacagtagaaaatctgatcatcctagcaaacaacagtttgtcttctaatgggaatgtaacagaatctggatgcaaagaatgtgaggaactggaggaaaaaaatattaaagaatttttgcagagttttgtacatattgtccaaatgttcatcaacacttctggaagcggagctactaacttcagcctgctgaagcaggctggagacgtggaggagaaccctggacctaagaaaagtggtgttcttttcctcttgggcatcatcttgctggttctgattggagtgcaaggaaccccagtagtgagaaagggtcgctgttcctgcatcagcaccaaccaagggactatccacctacaatccttgaaagaccttaaacaatttgccccaagcccttcctgcgagaaaattgaaatcattgctacactgaagaatggagttcaaacatgtctaaacccagattcagcagatgtgaaggaactgattaaaaagtgggagaaacaggtcagccaaaagaaaaagcaaaagaatgggaaaaaacatcaaaaaaagaaagttctgaaagttcgaaaatctcaacgttctcgtcaaaagaagactacaggaagcggagtgaaacagactttgaattttgaccttctcaagttggcgggagacgtggagtccaaccctggacctatgtgtcaccagcagttggtcatctcttggttttccctggtttttctggcatctcccctcgtggccatatgggaactgaagaaagatgtttatgtcgtagaattggattggtatccggatgcccctggagaaatggtggtcctcacctgtgacacccctgaagaagatggtatcacctggaccttggaccagagcagtgaggtcttaggctctggcaaaaccctgaccatccaagtcaaagagtttggagatgctggccagtacacctgtcacaaaggaggcgaggttctaagccattcgctcctgctgcttcacaaaaaggaagatggaatttggtccactgatattttaaaggaccagaaagaacccaaaaataagacctttctaagatgcgaggccaagaattattctggacgtttcacctgctggtggctgacgacaatcagtactgatttgacattcagtgtcaaaagcagcagaggctcttctgacccccaaggggtgacgtgcggagctgctacactctctgcagagagagtcagaggggacaacaaggagtatgagtactcagtggagtgccaggaggacagtgcctgcccagctgctgaggagagtctgcccattgaggtcatggtggatgccgttcacaagctcaagtatgaaaactacaccagcagcttcttcatcagggacatcatcaaacctgacccacccaagaacttgcagctgaagccattaaagaattctcggcaggtggaggtcagctgggagtaccctgacacctggagtactccacattcctacttctccctgacattctgcgttcaggtccagggcaagagcaagagagaaaagaaagatagagtcttcacggacaagacctcagccacggtcatctgccgcaaaaatgccagcattagcgtgcgggcccaggaccgctactatagctcatcttggagcgaatgggcatctgtgccctgcagtggagggggcggcagcgggggaggcggcagcggcggcgggggatcgagaaacctccccgtggccactccagacccaggaatgttcccatgccttcaccactcccaaaacctgctgagggccgtcagcaacatgctccagaaggccagacaaactctagaattttacccttgcacttctgaagagattgatcatgaagatatcacaaaagataaaaccagcacagtggaggcctgtttaccattggaattaaccaagaatgagagttgcctaaattccagagagacctctttcataactaatgggagttgcctggcctccagaaagacctcttttatgatggccctgtgccttagtagtatttatgaagacttgaagatgtaccaggtggagttcaagaccatgaatgcaaagcttctgatggatcctaagaggcagatctttctagatcaaaacatgctggcagttattgatgagctgatgcaggccctgaatttcaacagtgagactgtgccacaaaaatcctcccttgaagaaccggatttttataaaactaaaatcaagctctgcatacttcttcatgctttcagaattcgggcagtgactattgatagagtgatgagctatctgaatgcttcctaa

SEQ ID NO: 146 - DNA, 3627 bp, Artificial Sequence
  DNA sequence for the protein coding sequence of the NG-761 transgene cassette, including the stop codon
atggactggacctggcgcatcctgttcttggtggcagctgctacgggagctcattccaactgggtgaatgtaataagtgatttgaaaaaaattgaagatcttattcaatctatgcatattgatgctactttatatacggaaagtgatgttcaccccagttgcaaagtaacagcaatgaagtgctttctcttggagttacaagttatttcacttgagtccggagatgcaagtattcatgatacagtagaaaatctgatcatcctagcaaacaacagtttgtcttctaatgggaatgtaacagaatctggatgcaaagaatgtgaggaactggaggaaaaaaatattaaagaatttttgcagagttttgtacatattgtccaaatgttcatcaacacttctggaagcggacagtgtactaattatgctctcttgaaattggctggagatgttgagagcaaccctggacctgctcagtcactggctctgagcctccttatcctggttctggcctttggcatccccaggacccaaggcagtgatggaggggctcaggactgttgcctcaagtacagccaaaggaagattcccgccaaggttgtccgcagctaccggaagcaggaaccaagcttaggctgctccatcccagctatcctgttcttgccccgcaagcgctctcaggcagagctatgtgcagacccaaaggagctctgggtgcagcagctgatgcagcatctggacaagacaccatccccacagaaaccagcccagggctgcaggaaggacaggggggcctccaagactggcaagaaaggaaagggctccaaaggctgcaagaggactgagcggtcacagacccctaaagggccaggaagcggagagggcagaggaagtctgctaacatgcggtgacgtcgaggagaatcctggacctgccttgacctttgctttactggtggccctcctggtgctcagctgcaagtcaagctgctctgtgggctgtgatctgcctcaaacccacagcctgggtagcaggaggaccttgatgctcctggcacagatgaggagaatctctcttttctcctgcttgaaggacagacatgactttggatttccccaggaggagtttggcaaccagttccaaaaggctgaaaccatccctgtcctccatgagatgatccagcagatcttcaatctcttcagcacaaaggactcatctgctgcttgggatgagaccctcctagacaaattctacactgaactctaccagcagctgaatgacctggaagcctgtgtgatacagggggtgggggtgacagagactcccctgatgaaggaggactccattctggctgtgaggaaatacttccaaagaatcactctctatctgaaagagaagaaatacagcccttgtgcctgggaggttgtcagagcagaaatcatgagatctttttctttgtcaacaaacttgcaagaaagtttaagaagtaaggaaggaagcggagctactaacttcagcctgctgaagcaggctggagacgtggaggagaaccctggacctaagaaaagtggtgttcttttcctcttgggcatcatcttgctggttctgattggagtgcaaggaaccccagtagtgagaaagggtcgctgttcctgcatcagcaccaaccaagggactatccacctacaatccttgaaagaccttaaacaatttgccccaagcccttcctgcgagaaaattgaaatcattgctacactgaagaatggagttcaaacatgtctaaacccagattcagcagatgtgaaggaactgattaaaaagtgggagaaacaggtcagccaaaagaaaaagcaaaagaatgggaaaaaacatcaaaaaaagaaagttctgaaagttcgaaaatctcaacgttctcgtcaaaagaagactacaggaagcggagtgaaacagactttgaattttgaccttctcaagttggcgggagacgtggagtccaaccctggacctatgtgtcaccagcagttggtcatctcttggttttccctggtttttctggcatctcccctcgtggccatatgggaactgaagaaagatgtttatgtcgtagaattggattggtatccggatgcccctggagaaatggtggtcctcacctgtgacacccctgaagaagatggtatcacctggaccttggaccagagcagtgaggtcttaggctctggcaaaaccctgaccatccaagtcaaagagtttggagatgctggccagtacacctgtcacaaaggaggcgaggttctaagccattcgctcctgctgcttcacaaaaaggaagatggaatttggtccactgatattttaaaggaccagaaagaacccaaaaataagacctttctaagatgcgaggccaagaattattctggacgtttcacctgctggtggctgacgacaatcagtactgatttgacattcagtgtcaaaagcagcagaggctcttctgacccccaaggggtgacgtgcggagctgctacactctctgcagagagagtcagaggggacaacaaggagtatgagtactcagtggagtgccaggaggacagtgcctgcccagctgctgaggagagtctgcccattgaggtcatggtggatgccgttcacaagctcaagtatgaaaactacaccagcagcttcttcatcagggacatcatcaaacctgacccacccaagaacttgcagctgaagccattaaagaattctcggcaggtggaggtcagctgggagtaccctgacacctggagtactccacattcctacttctccctgacattctgcgttcaggtccagggcaagagcaagagagaaaagaaagatagagtcttcacggacaagacctcagccacggtcatctgccgcaaaaatgccagcattagcgtgcgggcccaggaccgctactatagctcatcttggagcgaatgggcatctgtgccctgcagtggagggggcggcagcgggggaggcggcagcggcggcgggggatcgagaaacctccccgtggccactccagacccaggaatgttcccatgccttcaccactcccaaaacctgctgagggccgtcagcaacatgctccagaaggccagacaaactctagaattttacccttgcacttctgaagagattgatcatgaagatatcacaaaagataaaaccagcacagtggaggcctgtttaccattggaattaaccaagaatgagagttgcctaaattccagagagacctctttcataactaatgggagttgcctggcctccagaaagacctcttttatgatggccctgtgccttagtagtatttatgaagacttgaagatgtaccaggtggagttcaagaccatgaatgcaaagcttctgatggatcctaagaggcagatctttctagatcaaaacatgctggcagttattgatgagctgatgcaggccctgaatttcaacagtgagactgtgccacaaaaatcctcccttgaagaaccggatttttataaaactaaaatcaagctctgcatacttcttcatgctttcagaattcgggcagtgactattgatagagtgatgagctatctgaatgcttcctaa

SEQ ID NO: 147 - DNA, 2718 bp, Artificial Sequence
  DNA sequence for the protein coding sequence of the NG-762 transgene cassette, including the stop codon
atggactggacctggcgcatcctgttcttggtggcagctgctacgggagctcattccaactgggtgaatgtaataagtgatttgaaaaaaattgaagatcttattcaatctatgcatattgatgctactttatatacggaaagtgatgttcaccccagttgcaaagtaacagcaatgaagtgctttctcttggagttacaagttatttcacttgagtccggagatgcaagtattcatgatacagtagaaaatctgatcatcctagcaaacaacagtttgtcttctaatgggaatgtaacagaatctggatgcaaagaatgtgaggaactggaggaaaaaaatattaaagaatttttgcagagttttgtacatattgtccaaatgttcatcaacacttctggaagcggagctactaacttcagcctgctgaagcaggctggagacgtggaggagaaccctggacctgccttgacctttgctttactggtggccctcctggtgctcagctgcaagtcaagctgctctgtgggctgtgatctgcctcaaacccacagcctgggtagcaggaggaccttgatgctcctggcacagatgaggagaatctctcttttctcctgcttgaaggacagacatgactttggatttccccaggaggagtttggcaaccagttccaaaaggctgaaaccatccctgtcctccatgagatgatccagcagatcttcaatctcttcagcacaaaggactcatctgctgcttgggatgagaccctcctagacaaattctacactgaactctaccagcagctgaatgacctggaagcctgtgtgatacagggggtgggggtgacagagactcccctgatgaaggaggactccattctggctgtgaggaaatacttccaaagaatcactctctatctgaaagagaagaaatacagcccttgtgcctgggaggttgtcagagcagaaatcatgagatctttttctttgtcaacaaacttgcaagaaagtttaagaagtaaggaaggaagcggacagtgtactaattatgctctcttgaaattggctggagatgttgagagcaaccctggacctatgtgtcaccagcagttggtcatctcttggttttccctggtttttctggcatctcccctcgtggccatatgggaactgaagaaagatgtttatgtcgtagaattggattggtatccggatgcccctggagaaatggtggtcctcacctgtgacacccctgaagaagatggtatcacctggaccttggaccagagcagtgaggtcttaggctctggcaaaaccctgaccatccaagtcaaagagtttggagatgctggccagtacacctgtcacaaaggaggcgaggttctaagccattcgctcctgctgcttcacaaaaaggaagatggaatttggtccactgatattttaaaggaccagaaagaacccaaaaataagacctttctaagatgcgaggccaagaattattctggacgtttcacctgctggtggctgacgacaatcagtactgatttgacattcagtgtcaaaagcagcagaggctcttctgacccccaaggggtgacgtgcggagctgctacactctctgcagagagagtcagaggggacaacaaggagtatgagtactcagtggagtgccaggaggacagtgcctgcccagctgctgaggagagtctgcccattgaggtcatggtggatgccgttcacaagctcaagtatgaaaactacaccagcagcttcttcatcagggacatcatcaaacctgacccacccaagaacttgcagctgaagccattaaagaattctcggcaggtggaggtcagctgggagtaccctgacacctggagtactccacattcctacttctccctgacattctgcgttcaggtccagggcaagagcaagagagaaaagaaagatagagtcttcacggacaagacctcagccacggtcatctgccgcaaaaatgccagcattagcgtgcgggcccaggaccgctactatagctcatcttggagcgaatgggcatctgtgccctgcagtggagggggcggcagcgggggaggcggcagcggcggcgggggatcgagaaacctccccgtggccactccagacccaggaatgttcccatgccttcaccactcccaaaacctgctgagggccgtcagcaacatgctccagaaggccagacaaactctagaattttacccttgcacttctgaagagattgatcatgaagatatcacaaaagataaaaccagcacagtggaggcctgtttaccattggaattaaccaagaatgagagttgcctaaattccagagagacctctttcataactaatgggagttgcctggcctccagaaagacctcttttatgatggccctgtgccttagtagtatttatgaagacttgaagatgtaccaggtggagttcaagaccatgaatgcaaagcttctgatggatcctaagaggcagatctttctagatcaaaacatgctggcagttattgatgagctgatgcaggccctgaatttcaacagtgagactgtgccacaaaaatcctcccttgaagaaccggatttttataaaactaaaatcaagctctgcatacttcttcatgctttcagaattcgggcagtgactattgatagagtgatgagctatctgaatgcttcctaa

SEQ ID NO: 148 - DNA, 2715 bp, Artificial Sequence
  DNA sequence for the protein coding sequence of the NG-763 transgene cassette, including the stop codon
atggactggacctggcgcatcctgttcttggtggcagctgctacgggagctcattccaactgggtgaatgtaataagtgatttgaaaaaaattgaagatcttattcaatctatgcatattgatgctactttatatacggaaagtgatgttcaccccagttgcaaagtaacagcaatgaagtgctttctcttggagttacaagttatttcacttgagtccggagatgcaagtattcatgatacagtagaaaatctgatcatcctagcaaacaacagtttgtcttctaatgggaatgtaacagaatctggatgcaaagaatgtgaggaactggaggaaaaaaatattaaagaatttttgcagagttttgtacatattgtccaaatgttcatcaacacttctggaagcggagagggcagaggaagtctgctaacatgcggtgacgtcgaggagaatcctggacctgccttgacctttgctttactggtggccctcctggtgctcagctgcaagtcaagctgctctgtgggctgtgatctgcctcaaacccacagcctgggtagcaggaggaccttgatgctcctggcacagatgaggagaatctctcttttctcctgcttgaaggacagacatgactttggatttccccaggaggagtttggcaaccagttccaaaaggctgaaaccatccctgtcctccatgagatgatccagcagatcttcaatctcttcagcacaaaggactcatctgctgcttgggatgagaccctcctagacaaattctacactgaactctaccagcagctgaatgacctggaagcctgtgtgatacagggggtgggggtgacagagactcccctgatgaaggaggactccattctggctgtgaggaaatacttccaaagaatcactctctatctgaaagagaagaaatacagcccttgtgcctgggaggttgtcagagcagaaatcatgagatctttttctttgtcaacaaacttgcaagaaagtttaagaagtaaggaaggaagcggacagtgtactaattatgctctcttgaaattggctggagatgttgagagcaaccctggacctatgtgtcaccagcagttggtcatctcttggttttccctggtttttctggcatctcccctcgtggccatatgggaactgaagaaagatgtttatgtcgtagaattggattggtatccggatgcccctggagaaatggtggtcctcacctgtgacacccctgaagaagatggtatcacctggaccttggaccagagcagtgaggtcttaggctctggcaaaaccctgaccatccaagtcaaagagtttggagatgctggccagtacacctgtcacaaaggaggcgaggttctaagccattcgctcctgctgcttcacaaaaaggaagatggaatttggtccactgatattttaaaggaccagaaagaacccaaaaataagacctttctaagatgcgaggccaagaattattctggacgtttcacctgctggtggctgacgacaatcagtactgatttgacattcagtgtcaaaagcagcagaggctcttctgacccccaaggggtgacgtgcggagctgctacactctctgcagagagagtcagaggggacaacaaggagtatgagtactcagtggagtgccaggaggacagtgcctgcccagctgctgaggagagtctgcccattgaggtcatggtggatgccgttcacaagctcaagtatgaaaactacaccagcagcttcttcatcagggacatcatcaaacctgacccacccaagaacttgcagctgaagccattaaagaattctcggcaggtggaggtcagctgggagtaccctgacacctggagtactccacattcctacttctccctgacattctgcgttcaggtccagggcaagagcaagagagaaaagaaagatagagtcttcacggacaagacctcagccacggtcatctgccgcaaaaatgccagcattagcgtgcgggcccaggaccgctactatagctcatcttggagcgaatgggcatctgtgccctgcagtggagggggcggcagcgggggaggcggcagcggcggcgggggatcgagaaacctccccgtggccactccagacccaggaatgttcccatgccttcaccactcccaaaacctgctgagggccgtcagcaacatgctccagaaggccagacaaactctagaattttacccttgcacttctgaagagattgatcatgaagatatcacaaaagataaaaccagcacagtggaggcctgtttaccattggaattaaccaagaatgagagttgcctaaattccagagagacctctttcataactaatgggagttgcctggcctccagaaagacctcttttatgatggccctgtgccttagtagtatttatgaagacttgaagatgtaccaggtggagttcaagaccatgaatgcaaagcttctgatggatcctaagaggcagatctttctagatcaaaacatgctggcagttattgatgagctgatgcaggccctgaatttcaacagtgagactgtgccacaaaaatcctcccttgaagaaccggatttttataaaactaaaatcaagctctgcatacttcttcatgctttcagaattcgggcagtgactattgatagagtgatgagctatctgaatgcttcctaa

SEQ ID NO: 149 - DNA, 2727 bp, Artificial Sequence
  DNA sequence for the protein coding sequence of the NG-764 transgene cassette, including the stop codon
atggactggacctggcgcatcctgttcttggtggcagctgctacgggagctcattccaactgggtgaatgtaataagtgatttgaaaaaaattgaagatcttattcaatctatgcatattgatgctactttatatacggaaagtgatgttcaccccagttgcaaagtaacagcaatgaagtgctttctcttggagttacaagttatttcacttgagtccggagatgcaagtattcatgatacagtagaaaatctgatcatcctagcaaacaacagtttgtcttctaatgggaatgtaacagaatctggatgcaaagaatgtgaggaactggaggaaaaaaatattaaagaatttttgcagagttttgtacatattgtccaaatgttcatcaacacttctggaagcggagtgaaacagactttgaattttgaccttctcaagttggcgggagacgtggagtccaaccctggacctgccttgacctttgctttactggtggccctcctggtgctcagctgcaagtcaagctgctctgtgggctgtgatctgcctcaaacccacagcctgggtagcaggaggaccttgatgctcctggcacagatgaggagaatctctcttttctcctgcttgaaggacagacatgactttggatttccccaggaggagtttggcaaccagttccaaaaggctgaaaccatccctgtcctccatgagatgatccagcagatcttcaatctcttcagcacaaaggactcatctgctgcttgggatgagaccctcctagacaaattctacactgaactctaccagcagctgaatgacctggaagcctgtgtgatacagggggtgggggtgacagagactcccctgatgaaggaggactccattctggctgtgaggaaatacttccaaagaatcactctctatctgaaagagaagaaatacagcccttgtgcctgggaggttgtcagagcagaaatcatgagatctttttctttgtcaacaaacttgcaagaaagtttaagaagtaaggaaggaagcggacagtgtactaattatgctctcttgaaattggctggagatgttgagagcaaccctggacctatgtgtcaccagcagttggtcatctcttggttttccctggtttttctggcatctcccctcgtggccatatgggaactgaagaaagatgtttatgtcgtagaattggattggtatccggatgcccctggagaaatggtggtcctcacctgtgacacccctgaagaagatggtatcacctggaccttggaccagagcagtgaggtcttaggctctggcaaaaccctgaccatccaagtcaaagagtttggagatgctggccagtacacctgtcacaaaggaggcgaggttctaagccattcgctcctgctgcttcacaaaaaggaagatggaatttggtccactgatattttaaaggaccagaaagaacccaaaaataagacctttctaagatgcgaggccaagaattattctggacgtttcacctgctggtggctgacgacaatcagtactgatttgacattcagtgtcaaaagcagcagaggctcttctgacccccaaggggtgacgtgcggagctgctacactctctgcagagagagtcagaggggacaacaaggagtatgagtactcagtggagtgccaggaggacagtgcctgcccagctgctgaggagagtctgcccattgaggtcatggtggatgccgttcacaagctcaagtatgaaaactacaccagcagcttcttcatcagggacatcatcaaacctgacccacccaagaacttgcagctgaagccattaaagaattctcggcaggtggaggtcagctgggagtaccctgacacctggagtactccacattcctacttctccctgacattctgcgttcaggtccagggcaagagcaagagagaaaagaaagatagagtcttcacggacaagacctcagccacggtcatctgccgcaaaaatgccagcattagcgtgcgggcccaggaccgctactatagctcatcttggagcgaatgggcatctgtgccctgcagtggagggggcggcagcgggggaggcggcagcggcggcgggggatcgagaaacctccccgtggccactccagacccaggaatgttcccatgccttcaccactcccaaaacctgctgagggccgtcagcaacatgctccagaaggccagacaaactctagaattttacccttgcacttctgaagagattgatcatgaagatatcacaaaagataaaaccagcacagtggaggcctgtttaccattggaattaaccaagaatgagagttgcctaaattccagagagacctctttcataactaatgggagttgcctggcctccagaaagacctcttttatgatggccctgtgccttagtagtatttatgaagacttgaagatgtaccaggtggagttcaagaccatgaatgcaaagcttctgatggatcctaagaggcagatctttctagatcaaaacatgctggcagttattgatgagctgatgcaggccctgaatttcaacagtgagactgtgccacaaaaatcctcccttgaagaaccggatttttataaaactaaaatcaagctctgcatacttcttcatgctttcagaattcgggcagtgactattgatagagtgatgagctatctgaatgcttcctaa

SEQ ID NO: 150 - DNA, 2535 bp, Artificial Sequence
  DNA sequence for the protein coding sequence of the NG-765 transgene cassette, including the stop codon
atggactggacctggcgcatcctgttcttggtggcagctgctacgggagctcattccaactgggtgaatgtaataagtgatttgaaaaaaattgaagatcttattcaatctatgcatattgatgctactttatatacggaaagtgatgttcaccccagttgcaaagtaacagcaatgaagtgctttctcttggagttacaagttatttcacttgagtccggagatgcaagtattcatgatacagtagaaaatctgatcatcctagcaaacaacagtttgtcttctaatgggaatgtaacagaatctggatgcaaagaatgtgaggaactggaggaaaaaaatattaaagaatttttgcagagttttgtacatattgtccaaatgttcatcaacacttctggaagcggagctactaacttcagcctgctgaagcaggctggagacgtggaggagaaccctggacctaagaaaagtggtgttcttttcctcttgggcatcatcttgctggttctgattggagtgcaaggaaccccagtagtgagaaagggtcgctgttcctgcatcagcaccaaccaagggactatccacctacaatccttgaaagaccttaaacaatttgccccaagcccttcctgcgagaaaattgaaatcattgctacactgaagaatggagttcaaacatgtctaaacccagattcagcagatgtgaaggaactgattaaaaagtgggagaaacaggtcagccaaaagaaaaagcaaaagaatgggaaaaaacatcaaaaaaagaaagttctgaaagttcgaaaatctcaacgttctcgtcaaaagaagactacaggaagcggagtgaaacagactttgaattttgaccttctcaagttggcgggagacgtggagtccaaccctggacctatgtgtcaccagcagttggtcatctcttggttttccctggtttttctggcatctcccctcgtggccatatgggaactgaagaaagatgtttatgtcgtagaattggattggtatccggatgcccctggagaaatggtggtcctcacctgtgacacccctgaagaagatggtatcacctggaccttggaccagagcagtgaggtcttaggctctggcaaaaccctgaccatccaagtcaaagagtttggagatgctggccagtacacctgtcacaaaggaggcgaggttctaagccattcgctcctgctgcttcacaaaaaggaagatggaatttggtccactgatattttaaaggaccagaaagaacccaaaaataagacctttctaagatgcgaggccaagaattattctggacgtttcacctgctggtggctgacgacaatcagtactgatttgacattcagtgtcaaaagcagcagaggctcttctgacccccaaggggtgacgtgcggagctgctacactctctgcagagagagtcagaggggacaacaaggagtatgagtactcagtggagtgccaggaggacagtgcctgcccagctgctgaggagagtctgcccattgaggtcatggtggatgccgttcacaagctcaagtatgaaaactacaccagcagcttcttcatcagggacatcatcaaacctgacccacccaagaacttgcagctgaagccattaaagaattctcggcaggtggaggtcagctgggagtaccctgacacctggagtactccacattcctacttctccctgacattctgcgttcaggtccagggcaagagcaagagagaaaagaaagatagagtcttcacggacaagacctcagccacggtcatctgccgcaaaaatgccagcattagcgtgcgggcccaggaccgctactatagctcatcttggagcgaatgggcatctgtgccctgcagtggagggggcggcagcgggggaggcggcagcggcggcgggggatcgagaaacctccccgtggccactccagacccaggaatgttcccatgccttcaccactcccaaaacctgctgagggccgtcagcaacatgctccagaaggccagacaaactctagaattttacccttgcacttctgaagagattgatcatgaagatatcacaaaagataaaaccagcacagtggaggcctgtttaccattggaattaaccaagaatgagagttgcctaaattccagagagacctctttcataactaatgggagttgcctggcctccagaaagacctcttttatgatggccctgtgccttagtagtatttatgaagacttgaagatgtaccaggtggagttcaagaccatgaatgcaaagcttctgatggatcctaagaggcagatctttctagatcaaaacatgctggcagttattgatgagctgatgcaggccctgaatttcaacagtgagactgtgccacaaaaatcctcccttgaagaaccggatttttataaaactaaaatcaagctctgcatacttcttcatgctttcagaattcgggcagtgactattgatagagtgatgagctatctgaatgcttcctaa

SEQ ID NO: 151 - DNA, 3627 bp, Artificial Sequence
  DNA sequence for the protein coding sequence of the NG-768 transgene cassette, including the stop codon
atgaagaaaagtggtgttcttttcctcttgggcatcatcttgctggttctgattggagtgcaaggaaccccagtagtgagaaagggtcgctgttcctgcatcagcaccaaccaagggactatccacctacaatccttgaaagaccttaaacaatttgccccaagcccttcctgcgagaaaattgaaatcattgctacactgaagaatggagttcaaacatgtctaaacccagattcagcagatgtgaaggaactgattaaaaagtgggagaaacaggtcagccaaaagaaaaagcaaaagaatgggaaaaaacatcaaaaaaagaaagttctgaaagttcgaaaatctcaacgttctcgtcaaaagaagactacaggaagcggagagggcagaggaagtctgctaacatgcggtgacgtcgaggagaatcctggacctgcccaatctctcgcacttagtctgctcattctcgtgcttgctttcgggattccaagaactcagggaagcgacggcggtgcccaagattgctgtctgaaatatagtcagagaaaaatccctgctaaagtggttcggagttatcgcaaacaagagcccagtttggggtgttcaattcccgcaattctctttttaccacggaaacggtcccaagctgaactgtgcgctgatcctaaagaactgtgggtccaacagctcatgcaacaccttgataaaaccccttctccccaaaagcctgctcaagggtgtagaaaagatagaggagcttctaaaaccggtaaaaagggcaaagggtctaagggatgtaaaagaaccgaacgctcccaaactcccaagggccccggaagcggagctactaacttcagcctgctgaagcaggctggagacgtggaggagaaccctggacctgccttgacctttgctttactggtggccctcctggtgctcagctgcaagtcaagctgctctgtgggctgtgatctgcctcaaacccacagcctgggtagcaggaggaccttgatgctcctggcacagatgaggagaatctctcttttctcctgcttgaaggacagacatgactttggatttccccaggaggagtttggcaaccagttccaaaaggctgaaaccatccctgtcctccatgagatgatccagcagatcttcaatctcttcagcacaaaggactcatctgctgcttgggatgagaccctcctagacaaattctacactgaactctaccagcagctgaatgacctggaagcctgtgtgatacagggggtgggggtgacagagactcccctgatgaaggaggactccattctggctgtgaggaaatacttccaaagaatcactctctatctgaaagagaagaaatacagcccttgtgcctgggaggttgtcagagcagaaatcatgagatctttttctttgtcaacaaacttgcaagaaagtttaagaagtaaggaaggaagcggacagtgtactaattatgctctcttgaaattggctggagatgttgagagcaaccctggacctgactggacctggcgcatcctgttcttggtggcagctgctacgggagctcattccaactgggtgaatgtaataagtgatttgaaaaaaattgaagatcttattcaatctatgcatattgatgctactttatatacggaaagtgatgttcaccccagttgcaaagtaacagcaatgaagtgctttctcttggagttacaagttatttcacttgagtccggagatgcaagtattcatgatacagtagaaaatctgatcatcctagcaaacaacagtttgtcttctaatgggaatgtaacagaatctggatgcaaagaatgtgaggaactggaggaaaaaaatattaaagaatttttgcagagttttgtacatattgtccaaatgttcatcaacacttctggaagcggagtgaaacagactttgaattttgaccttctcaagttggcgggagacgtggagtccaaccctggacctatgtgtcaccagcagttggtcatctcttggttttccctggtttttctggcatctcccctcgtggccatatgggaactgaagaaagatgtttatgtcgtagaattggattggtatccggatgcccctggagaaatggtggtcctcacctgtgacacccctgaagaagatggtatcacctggaccttggaccagagcagtgaggtcttaggctctggcaaaaccctgaccatccaagtcaaagagtttggagatgctggccagtacacctgtcacaaaggaggcgaggttctaagccattcgctcctgctgcttcacaaaaaggaagatggaatttggtccactgatattttaaaggaccagaaagaacccaaaaataagacctttctaagatgcgaggccaagaattattctggacgtttcacctgctggtggctgacgacaatcagtactgatttgacattcagtgtcaaaagcagcagaggctcttctgacccccaaggggtgacgtgcggagctgctacactctctgcagagagagtcagaggggacaacaaggagtatgagtactcagtggagtgccaggaggacagtgcctgcccagctgctgaggagagtctgcccattgaggtcatggtggatgccgttcacaagctcaagtatgaaaactacaccagcagcttcttcatcagggacatcatcaaacctgacccacccaagaacttgcagctgaagccattaaagaattctcggcaggtggaggtcagctgggagtaccctgacacctggagtactccacattcctacttctccctgacattctgcgttcaggtccagggcaagagcaagagagaaaagaaagatagagtcttcacggacaagacctcagccacggtcatctgccgcaaaaatgccagcattagcgtgcgggcccaggaccgctactatagctcatcttggagcgaatgggcatctgtgccctgcagtggagggggcggcagcgggggaggcggcagcggcggcgggggatcgagaaacctccccgtggccactccagacccaggaatgttcccatgccttcaccactcccaaaacctgctgagggccgtcagcaacatgctccagaaggccagacaaactctagaattttacccttgcacttctgaagagattgatcatgaagatatcacaaaagataaaaccagcacagtggaggcctgtttaccattggaattaaccaagaatgagagttgcctaaattccagagagacctctttcataactaatgggagttgcctggcctccagaaagacctcttttatgatggccctgtgccttagtagtatttatgaagacttgaagatgtaccaggtggagttcaagaccatgaatgcaaagcttctgatggatcctaagaggcagatctttctagatcaaaacatgctggcagttattgatgagctgatgcaggccctgaatttcaacagtgagactgtgccacaaaaatcctcccttgaagaaccggatttttataaaactaaaatcaagctctgcatacttcttcatgctttcagaattcgggcagtgactattgatagagtgatgagctatctgaatgcttcctaa

SEQ ID NO: 152 - DNA, 3531 bp, Artificial Sequence
  DNA sequence for the protein coding sequence of the NG-769 transgene cassette, including the stop codon
atggcccaatctctcgcacttagtctgctcattctcgtgcttgctttcgggattccaagaactcagggaagcgacggcggtgcccaagattgctgtctgaaatatagtcagagaaaaatccctgctaaagtggttcggagttatcgcaaacaagagcccagtttggggtgttcaattcccgcaattctctttttaccacggaaacggtcccaagctgaactgtgcgctgatcctaaagaactgtgggtccaacagctcatgcaacaccttgataaaaccccttctccccaaaagcctgctcaagggggaagcggagctactaacttcagcctgctgaagcaggctggagacgtggaggagaaccctggacctgactggacctggcgcatcctgttcttggtggcagctgctacgggagctcattccaactgggtgaatgtaataagtgatttgaaaaaaattgaagatcttattcaatctatgcatattgatgctactttatatacggaaagtgatgttcaccccagttgcaaagtaacagcaatgaagtgctttctcttggagttacaagttatttcacttgagtccggagatgcaagtattcatgatacagtagaaaatctgatcatcctagcaaacaacagtttgtcttctaatgggaatgtaacagaatctggatgcaaagaatgtgaggaactggaggaaaaaaatattaaagaatttttgcagagttttgtacatattgtccaaatgttcatcaacacttctggaagcggagagggcagaggaagtctgctaacatgcggtgacgtcgaggagaatcctggacctgccttgacctttgctttactggtggccctcctggtgctcagctgcaagtcaagctgctctgtgggctgtgatctgcctcaaacccacagcctgggtagcaggaggaccttgatgctcctggcacagatgaggagaatctctcttttctcctgcttgaaggacagacatgactttggatttccccaggaggagtttggcaaccagttccaaaaggctgaaaccatccctgtcctccatgagatgatccagcagatcttcaatctcttcagcacaaaggactcatctgctgcttgggatgagaccctcctagacaaattctacactgaactctaccagcagctgaatgacctggaagcctgtgtgatacagggggtgggggtgacagagactcccctgatgaaggaggactccattctggctgtgaggaaatacttccaaagaatcactctctatctgaaagagaagaaatacagcccttgtgcctgggaggttgtcagagcagaaatcatgagatctttttctttgtcaacaaacttgcaagaaagtttaagaagtaaggaaggaagcggacagtgtactaattatgctctcttgaaattggctggagatgttgagagcaaccctggacctaagaaaagtggtgttcttttcctcttgggcatcatcttgctggttctgattggagtgcaaggaaccccagtagtgagaaagggtcgctgttcctgcatcagcaccaaccaagggactatccacctacaatccttgaaagaccttaaacaatttgccccaagcccttcctgcgagaaaattgaaatcattgctacactgaagaatggagttcaaacatgtctaaacccagattcagcagatgtgaaggaactgattaaaaagtgggagaaacaggtcagccaaaagaaaaagcaaaagaatgggaaaaaacatcaaaaaaagaaagttctgaaagttcgaaaatctcaacgttctcgtcaaaagaagactacaggaagcggagtgaaacagactttgaattttgaccttctcaagttggcgggagacgtggagtccaaccctggacctatgtgtcaccagcagttggtcatctcttggttttccctggtttttctggcatctcccctcgtggccatatgggaactgaagaaagatgtttatgtcgtagaattggattggtatccggatgcccctggagaaatggtggtcctcacctgtgacacccctgaagaagatggtatcacctggaccttggaccagagcagtgaggtcttaggctctggcaaaaccctgaccatccaagtcaaagagtttggagatgctggccagtacacctgtcacaaaggaggcgaggttctaagccattcgctcctgctgcttcacaaaaaggaagatggaatttggtccactgatattttaaaggaccagaaagaacccaaaaataagacctttctaagatgcgaggccaagaattattctggacgtttcacctgctggtggctgacgacaatcagtactgatttgacattcagtgtcaaaagcagcagaggctcttctgacccccaaggggtgacgtgcggagctgctacactctctgcagagagagtcagaggggacaacaaggagtatgagtactcagtggagtgccaggaggacagtgcctgcccagctgctgaggagagtctgcccattgaggtcatggtggatgccgttcacaagctcaagtatgaaaactacaccagcagcttcttcatcagggacatcatcaaacctgacccacccaagaacttgcagctgaagccattaaagaattctcggcaggtggaggtcagctgggagtaccctgacacctggagtactccacattcctacttctccctgacattctgcgttcaggtccagggcaagagcaagagagaaaagaaagatagagtcttcacggacaagacctcagccacggtcatctgccgcaaaaatgccagcattagcgtgcgggcccaggaccgctactatagctcatcttggagcgaatgggcatctgtgccctgcagtggagggggcggcagcgggggaggcggcagcggcggcgggggatcgagaaacctccccgtggccactccagacccaggaatgttcccatgccttcaccactcccaaaacctgctgagggccgtcagcaacatgctccagaaggccagacaaactctagaattttacccttgcacttctgaagagattgatcatgaagatatcacaaaagataaaaccagcacagtggaggcctgtttaccattggaattaaccaagaatgagagttgcctaaattccagagagacctctttcataactaatgggagttgcctggcctccagaaagacctcttttatgatggccctgtgccttagtagtatttatgaagacttgaagatgtaccaggtggagttcaagaccatgaatgcaaagcttctgatggatcctaagaggcagatctttctagatcaaaacatgctggcagttattgatgagctgatgcaggccctgaatttcaacagtgagactgtgccacaaaaatcctcccttgaagaaccggatttttataaaactaaaatcaagctctgcatacttcttcatgctttcagaattcgggcagtgactattgatagagtgatgagctatctgaatgcttcctaa

SEQ ID NO: 153 - DNA, 3531 bp, Artificial Sequence
  DNA sequence for the protein coding sequence of the NG-770 transgene cassette, including the stop codon
atggactggacctggcgcatcctgttcttggtggcagctgctacgggagctcattccaactgggtgaatgtaataagtgatttgaaaaaaattgaagatcttattcaatctatgcatattgatgctactttatatacggaaagtgatgttcaccccagttgcaaagtaacagcaatgaagtgctttctcttggagttacaagttatttcacttgagtccggagatgcaagtattcatgatacagtagaaaatctgatcatcctagcaaacaacagtttgtcttctaatgggaatgtaacagaatctggatgcaaagaatgtgaggaactggaggaaaaaaatattaaagaatttttgcagagttttgtacatattgtccaaatgttcatcaacacttctggaagcggagctactaacttcagcctgctgaagcaggctggagacgtggaggagaaccctggacctgcccaatctctcgcacttagtctgctcattctcgtgcttgctttcgggattccaagaactcagggaagcgacggcggtgcccaagattgctgtctgaaatatagtcagagaaaaatccctgctaaagtggttcggagttatcgcaaacaagagcccagtttggggtgttcaattcccgcaattctctttttaccacggaaacggtcccaagctgaactgtgcgctgatcctaaagaactgtgggtccaacagctcatgcaacaccttgataaaaccccttctccccaaaagcctgctcaagggggaagcggagagggcagaggaagtctgctaacatgcggtgacgtcgaggagaatcctggacctgccttgacctttgctttactggtggccctcctggtgctcagctgcaagtcaagctgctctgtgggctgtgatctgcctcaaacccacagcctgggtagcaggaggaccttgatgctcctggcacagatgaggagaatctctcttttctcctgcttgaaggacagacatgactttggatttccccaggaggagtttggcaaccagttccaaaaggctgaaaccatccctgtcctccatgagatgatccagcagatcttcaatctcttcagcacaaaggactcatctgctgcttgggatgagaccctcctagacaaattctacactgaactctaccagcagctgaatgacctggaagcctgtgtgatacagggggtgggggtgacagagactcccctgatgaaggaggactccattctggctgtgaggaaatacttccaaagaatcactctctatctgaaagagaagaaatacagcccttgtgcctgggaggttgtcagagcagaaatcatgagatctttttctttgtcaacaaacttgcaagaaagtttaagaagtaaggaaggaagcggacagtgtactaattatgctctcttgaaattggctggagatgttgagagcaaccctggacctaagaaaagtggtgttcttttcctcttgggcatcatcttgctggttctgattggagtgcaaggaaccccagtagtgagaaagggtcgctgttcctgcatcagcaccaaccaagggactatccacctacaatccttgaaagaccttaaacaatttgccccaagcccttcctgcgagaaaattgaaatcattgctacactgaagaatggagttcaaacatgtctaaacccagattcagcagatgtgaaggaactgattaaaaagtgggagaaacaggtcagccaaaagaaaaagcaaaagaatgggaaaaaacatcaaaaaaagaaagttctgaaagttcgaaaatctcaacgttctcgtcaaaagaagactacaggaagcggagtgaaacagactttgaattttgaccttctcaagttggcgggagacgtggagtccaaccctggacctatgtgtcaccagcagttggtcatctcttggttttccctggtttttctggcatctcccctcgtggccatatgggaactgaagaaagatgtttatgtcgtagaattggattggtatccggatgcccctggagaaatggtggtcctcacctgtgacacccctgaagaagatggtatcacctggaccttggaccagagcagtgaggtcttaggctctggcaaaaccctgaccatccaagtcaaagagtttggagatgctggccagtacacctgtcacaaaggaggcgaggttctaagccattcgctcctgctgcttcacaaaaaggaagatggaatttggtccactgatattttaaaggaccagaaagaacccaaaaataagacctttctaagatgcgaggccaagaattattctggacgtttcacctgctggtggctgacgacaatcagtactgatttgacattcagtgtcaaaagcagcagaggctcttctgacccccaaggggtgacgtgcggagctgctacactctctgcagagagagtcagaggggacaacaaggagtatgagtactcagtggagtgccaggaggacagtgcctgcccagctgctgaggagagtctgcccattgaggtcatggtggatgccgttcacaagctcaagtatgaaaactacaccagcagcttcttcatcagggacatcatcaaacctgacccacccaagaacttgcagctgaagccattaaagaattctcggcaggtggaggtcagctgggagtaccctgacacctggagtactccacattcctacttctccctgacattctgcgttcaggtccagggcaagagcaagagagaaaagaaagatagagtcttcacggacaagacctcagccacggtcatctgccgcaaaaatgccagcattagcgtgcgggcccaggaccgctactatagctcatcttggagcgaatgggcatctgtgccctgcagtggagggggcggcagcgggggaggcggcagcggcggcgggggatcgagaaacctccccgtggccactccagacccaggaatgttcccatgccttcaccactcccaaaacctgctgagggccgtcagcaacatgctccagaaggccagacaaactctagaattttacccttgcacttctgaagagattgatcatgaagatatcacaaaagataaaaccagcacagtggaggcctgtttaccattggaattaaccaagaatgagagttgcctaaattccagagagacctctttcataactaatgggagttgcctggcctccagaaagacctcttttatgatggccctgtgccttagtagtatttatgaagacttgaagatgtaccaggtggagttcaagaccatgaatgcaaagcttctgatggatcctaagaggcagatctttctagatcaaaacatgctggcagttattgatgagctgatgcaggccctgaatttcaacagtgagactgtgccacaaaaatcctcccttgaagaaccggatttttataaaactaaaatcaagctctgcatacttcttcatgctttcagaattcgggcagtgactattgatagagtgatgagctatctgaatgcttcctaa

SEQ ID NO: 154 - DNA, 3531 bp, Artificial Sequence
  DNA sequence for the protein coding sequence of the NG-771 transgene cassette, including the stop codon
atggcccaatctctcgcacttagtctgctcattctcgtgcttgctttcgggattccaagaactcagggaagcgacggcggtgcccaagattgctgtctgaaatatagtcagagaaaaatccctgctaaagtggttcggagttatcgcaaacaagagcccagtttggggtgttcaattcccgcaattctctttttaccacggaaacggtcccaagctgaactgtgcgctgatcctaaagaactgtgggtccaacagctcatgcaacaccttgataaaaccccttctccccaaaagcctgctcaagggggaagcggagagggcagaggaagtctgctaacatgcggtgacgtcgaggagaatcctggacctgactggacctggcgcatcctgttcttggtggcagctgctacgggagctcattccaactgggtgaatgtaataagtgatttgaaaaaaattgaagatcttattcaatctatgcatattgatgctactttatatacggaaagtgatgttcaccccagttgcaaagtaacagcaatgaagtgctttctcttggagttacaagttatttcacttgagtccggagatgcaagtattcatgatacagtagaaaatctgatcatcctagcaaacaacagtttgtcttctaatgggaatgtaacagaatctggatgcaaagaatgtgaggaactggaggaaaaaaatattaaagaatttttgcagagttttgtacatattgtccaaatgttcatcaacacttctggaagcggagctactaacttcagcctgctgaagcaggctggagacgtggaggagaaccctggacctgccttgacctttgctttactggtggccctcctggtgctcagctgcaagtcaagctgctctgtgggctgtgatctgcctcaaacccacagcctgggtagcaggaggaccttgatgctcctggcacagatgaggagaatctctcttttctcctgcttgaaggacagacatgactttggatttccccaggaggagtttggcaaccagttccaaaaggctgaaaccatccctgtcctccatgagatgatccagcagatcttcaatctcttcagcacaaaggactcatctgctgcttgggatgagaccctcctagacaaattctacactgaactctaccagcagctgaatgacctggaagcctgtgtgatacagggggtgggggtgacagagactcccctgatgaaggaggactccattctggctgtgaggaaatacttccaaagaatcactctctatctgaaagagaagaaatacagcccttgtgcctgggaggttgtcagagcagaaatcatgagatctttttctttgtcaacaaacttgcaagaaagtttaagaagtaaggaaggaagcggacagtgtactaattatgctctcttgaaattggctggagatgttgagagcaaccctggacctaagaaaagtggtgttcttttcctcttgggcatcatcttgctggttctgattggagtgcaaggaaccccagtagtgagaaagggtcgctgttcctgcatcagcaccaaccaagggactatccacctacaatccttgaaagaccttaaacaatttgccccaagcccttcctgcgagaaaattgaaatcattgctacactgaagaatggagttcaaacatgtctaaacccagattcagcagatgtgaaggaactgattaaaaagtgggagaaacaggtcagccaaaagaaaaagcaaaagaatgggaaaaaacatcaaaaaaagaaagttctgaaagttcgaaaatctcaacgttctcgtcaaaagaagactacaggaagcggagtgaaacagactttgaattttgaccttctcaagttggcgggagacgtggagtccaaccctggacctatgtgtcaccagcagttggtcatctcttggttttccctggtttttctggcatctcccctcgtggccatatgggaactgaagaaagatgtttatgtcgtagaattggattggtatccggatgcccctggagaaatggtggtcctcacctgtgacacccctgaagaagatggtatcacctggaccttggaccagagcagtgaggtcttaggctctggcaaaaccctgaccatccaagtcaaagagtttggagatgctggccagtacacctgtcacaaaggaggcgaggttctaagccattcgctcctgctgcttcacaaaaaggaagatggaatttggtccactgatattttaaaggaccagaaagaacccaaaaataagacctttctaagatgcgaggccaagaattattctggacgtttcacctgctggtggctgacgacaatcagtactgatttgacattcagtgtcaaaagcagcagaggctcttctgacccccaaggggtgacgtgcggagctgctacactctctgcagagagagtcagaggggacaacaaggagtatgagtactcagtggagtgccaggaggacagtgcctgcccagctgctgaggagagtctgcccattgaggtcatggtggatgccgttcacaagctcaagtatgaaaactacaccagcagcttcttcatcagggacatcatcaaacctgacccacccaagaacttgcagctgaagccattaaagaattctcggcaggtggaggtcagctgggagtaccctgacacctggagtactccacattcctacttctccctgacattctgcgttcaggtccagggcaagagcaagagagaaaagaaagatagagtcttcacggacaagacctcagccacggtcatctgccgcaaaaatgccagcattagcgtgcgggcccaggaccgctactatagctcatcttggagcgaatgggcatctgtgccctgcagtggagggggcggcagcgggggaggcggcagcggcggcgggggatcgagaaacctccccgtggccactccagacccaggaatgttcccatgccttcaccactcccaaaacctgctgagggccgtcagcaacatgctccagaaggccagacaaactctagaattttacccttgcacttctgaagagattgatcatgaagatatcacaaaagataaaaccagcacagtggaggcctgtttaccattggaattaaccaagaatgagagttgcctaaattccagagagacctctttcataactaatgggagttgcctggcctccagaaagacctcttttatgatggccctgtgccttagtagtatttatgaagacttgaagatgtaccaggtggagttcaagaccatgaatgcaaagcttctgatggatcctaagaggcagatctttctagatcaaaacatgctggcagttattgatgagctgatgcaggccctgaatttcaacagtgagactgtgccacaaaaatcctcccttgaagaaccggatttttataaaactaaaatcaagctctgcatacttcttcatgctttcagaattcgggcagtgactattgatagagtgatgagctatctgaatgcttcctaa

SEQ ID NO: 155 - DNA, 3531 bp, Artificial Sequence
  DNA sequence for the protein coding sequence of the NG-772 transgene cassette, including the stop codon
atggactggacctggcgcatcctgttcttggtggcagctgctacgggagctcattccaactgggtgaatgtaataagtgatttgaaaaaaattgaagatcttattcaatctatgcatattgatgctactttatatacggaaagtgatgttcaccccagttgcaaagtaacagcaatgaagtgctttctcttggagttacaagttatttcacttgagtccggagatgcaagtattcatgatacagtagaaaatctgatcatcctagcaaacaacagtttgtcttctaatgggaatgtaacagaatctggatgcaaagaatgtgaggaactggaggaaaaaaatattaaagaatttttgcagagttttgtacatattgtccaaatgttcatcaacacttctggaagcggagagggcagaggaagtctgctaacatgcggtgacgtcgaggagaatcctggacctgcccaatctctcgcacttagtctgctcattctcgtgcttgctttcgggattccaagaactcagggaagcgacggcggtgcccaagattgctgtctgaaatatagtcagagaaaaatccctgctaaagtggttcggagttatcgcaaacaagagcccagtttggggtgttcaattcccgcaattctctttttaccacggaaacggtcccaagctgaactgtgcgctgatcctaaagaactgtgggtccaacagctcatgcaacaccttgataaaaccccttctccccaaaagcctgctcaagggggaagcggagctactaacttcagcctgctgaagcaggctggagacgtggaggagaaccctggacctgccttgacctttgctttactggtggccctcctggtgctcagctgcaagtcaagctgctctgtgggctgtgatctgcctcaaacccacagcctgggtagcaggaggaccttgatgctcctggcacagatgaggagaatctctcttttctcctgcttgaaggacagacatgactttggatttccccaggaggagtttggcaaccagttccaaaaggctgaaaccatccctgtcctccatgagatgatccagcagatcttcaatctcttcagcacaaaggactcatctgctgcttgggatgagaccctcctagacaaattctacactgaactctaccagcagctgaatgacctggaagcctgtgtgatacagggggtgggggtgacagagactcccctgatgaaggaggactccattctggctgtgaggaaatacttccaaagaatcactctctatctgaaagagaagaaatacagcccttgtgcctgggaggttgtcagagcagaaatcatgagatctttttctttgtcaacaaacttgcaagaaagtttaagaagtaaggaaggaagcggacagtgtactaattatgctctcttgaaattggctggagatgttgagagcaaccctggacctaagaaaagtggtgttcttttcctcttgggcatcatcttgctggttctgattggagtgcaaggaaccccagtagtgagaaagggtcgctgttcctgcatcagcaccaaccaagggactatccacctacaatccttgaaagaccttaaacaatttgccccaagcccttcctgcgagaaaattgaaatcattgctacactgaagaatggagttcaaacatgtctaaacccagattcagcagatgtgaaggaactgattaaaaagtgggagaaacaggtcagccaaaagaaaaagcaaaagaatgggaaaaaacatcaaaaaaagaaagttctgaaagttcgaaaatctcaacgttctcgtcaaaagaagactacaggaagcggagtgaaacagactttgaattttgaccttctcaagttggcgggagacgtggagtccaaccctggacctatgtgtcaccagcagttggtcatctcttggttttccctggtttttctggcatctcccctcgtggccatatgggaactgaagaaagatgtttatgtcgtagaattggattggtatccggatgcccctggagaaatggtggtcctcacctgtgacacccctgaagaagatggtatcacctggaccttggaccagagcagtgaggtcttaggctctggcaaaaccctgaccatccaagtcaaagagtttggagatgctggccagtacacctgtcacaaaggaggcgaggttctaagccattcgctcctgctgcttcacaaaaaggaagatggaatttggtccactgatattttaaaggaccagaaagaacccaaaaataagacctttctaagatgcgaggccaagaattattctggacgtttcacctgctggtggctgacgacaatcagtactgatttgacattcagtgtcaaaagcagcagaggctcttctgacccccaaggggtgacgtgcggagctgctacactctctgcagagagagtcagaggggacaacaaggagtatgagtactcagtggagtgccaggaggacagtgcctgcccagctgctgaggagagtctgcccattgaggtcatggtggatgccgttcacaagctcaagtatgaaaactacaccagcagcttcttcatcagggacatcatcaaacctgacccacccaagaacttgcagctgaagccattaaagaattctcggcaggtggaggtcagctgggagtaccctgacacctggagtactccacattcctacttctccctgacattctgcgttcaggtccagggcaagagcaagagagaaaagaaagatagagtcttcacggacaagacctcagccacggtcatctgccgcaaaaatgccagcattagcgtgcgggcccaggaccgctactatagctcatcttggagcgaatgggcatctgtgccctgcagtggagggggcggcagcgggggaggcggcagcggcggcgggggatcgagaaacctccccgtggccactccagacccaggaatgttcccatgccttcaccactcccaaaacctgctgagggccgtcagcaacatgctccagaaggccagacaaactctagaattttacccttgcacttctgaagagattgatcatgaagatatcacaaaagataaaaccagcacagtggaggcctgtttaccattggaattaaccaagaatgagagttgcctaaattccagagagacctctttcataactaatgggagttgcctggcctccagaaagacctcttttatgatggccctgtgccttagtagtatttatgaagacttgaagatgtaccaggtggagttcaagaccatgaatgcaaagcttctgatggatcctaagaggcagatctttctagatcaaaacatgctggcagttattgatgagctgatgcaggccctgaatttcaacagtgagactgtgccacaaaaatcctcccttgaagaaccggatttttataaaactaaaatcaagctctgcatacttcttcatgctttcagaattcgggcagtgactattgatagagtgatgagctatctgaatgcttcctaa

SEQ ID NO: 156 - DNA, 3531 bp, Artificial Sequence
  DNA sequence for the protein coding sequence of the NG-773 transgene cassette, including the stop codon
atgaagaaaagtggtgttcttttcctcttgggcatcatcttgctggttctgattggagtgcaaggaaccccagtagtgagaaagggtcgctgttcctgcatcagcaccaaccaagggactatccacctacaatccttgaaagaccttaaacaatttgccccaagcccttcctgcgagaaaattgaaatcattgctacactgaagaatggagttcaaacatgtctaaacccagattcagcagatgtgaaggaactgattaaaaagtgggagaaacaggtcagccaaaagaaaaagcaaaagaatgggaaaaaacatcaaaaaaagaaagttctgaaagttcgaaaatctcaacgttctcgtcaaaagaagactacaggaagcggagagggcagaggaagtctgctaacatgcggtgacgtcgaggagaatcctggacctgcccaatctctcgcacttagtctgctcattctcgtgcttgctttcgggattccaagaactcagggaagcgacggcggtgcccaagattgctgtctgaaatatagtcagagaaaaatccctgctaaagtggttcggagttatcgcaaacaagagcccagtttggggtgttcaattcccgcaattctctttttaccacggaaacggtcccaagctgaactgtgcgctgatcctaaagaactgtgggtccaacagctcatgcaacaccttgataaaaccccttctccccaaaagcctgctcaagggggaagcggagctactaacttcagcctgctgaagcaggctggagacgtggaggagaaccctggacctgccttgacctttgctttactggtggccctcctggtgctcagctgcaagtcaagctgctctgtgggctgtgatctgcctcaaacccacagcctgggtagcaggaggaccttgatgctcctggcacagatgaggagaatctctcttttctcctgcttgaaggacagacatgactttggatttccccaggaggagtttggcaaccagttccaaaaggctgaaaccatccctgtcctccatgagatgatccagcagatcttcaatctcttcagcacaaaggactcatctgctgcttgggatgagaccctcctagacaaattctacactgaactctaccagcagctgaatgacctggaagcctgtgtgatacagggggtgggggtgacagagactcccctgatgaaggaggactccattctggctgtgaggaaatacttccaaagaatcactctctatctgaaagagaagaaatacagcccttgtgcctgggaggttgtcagagcagaaatcatgagatctttttctttgtcaacaaacttgcaagaaagtttaagaagtaaggaaggaagcggacagtgtactaattatgctctcttgaaattggctggagatgttgagagcaaccctggacctgactggacctggcgcatcctgttcttggtggcagctgctacgggagctcattccaactgggtgaatgtaataagtgatttgaaaaaaattgaagatcttattcaatctatgcatattgatgctactttatatacggaaagtgatgttcaccccagttgcaaagtaacagcaatgaagtgctttctcttggagttacaagttatttcacttgagtccggagatgcaagtattcatgatacagtagaaaatctgatcatcctagcaaacaacagtttgtcttctaatgggaatgtaacagaatctggatgcaaagaatgtgaggaactggaggaaaaaaatattaaagaatttttgcagagttttgtacatattgtccaaatgttcatcaacacttctggaagcggagtgaaacagactttgaattttgaccttctcaagttggcgggagacgtggagtccaaccctggacctatgtgtcaccagcagttggtcatctcttggttttccctggtttttctggcatctcccctcgtggccatatgggaactgaagaaagatgtttatgtcgtagaattggattggtatccggatgcccctggagaaatggtggtcctcacctgtgacacccctgaagaagatggtatcacctggaccttggaccagagcagtgaggtcttaggctctggcaaaaccctgaccatccaagtcaaagagtttggagatgctggccagtacacctgtcacaaaggaggcgaggttctaagccattcgctcctgctgcttcacaaaaaggaagatggaatttggtccactgatattttaaaggaccagaaagaacccaaaaataagacctttctaagatgcgaggccaagaattattctggacgtttcacctgctggtggctgacgacaatcagtactgatttgacattcagtgtcaaaagcagcagaggctcttctgacccccaaggggtgacgtgcggagctgctacactctctgcagagagagtcagaggggacaacaaggagtatgagtactcagtggagtgccaggaggacagtgcctgcccagctgctgaggagagtctgcccattgaggtcatggtggatgccgttcacaagctcaagtatgaaaactacaccagcagcttcttcatcagggacatcatcaaacctgacccacccaagaacttgcagctgaagccattaaagaattctcggcaggtggaggtcagctgggagtaccctgacacctggagtactccacattcctacttctccctgacattctgcgttcaggtccagggcaagagcaagagagaaaagaaagatagagtcttcacggacaagacctcagccacggtcatctgccgcaaaaatgccagcattagcgtgcgggcccaggaccgctactatagctcatcttggagcgaatgggcatctgtgccctgcagtggagggggcggcagcgggggaggcggcagcggcggcgggggatcgagaaacctccccgtggccactccagacccaggaatgttcccatgccttcaccactcccaaaacctgctgagggccgtcagcaacatgctccagaaggccagacaaactctagaattttacccttgcacttctgaagagattgatcatgaagatatcacaaaagataaaaccagcacagtggaggcctgtttaccattggaattaaccaagaatgagagttgcctaaattccagagagacctctttcataactaatgggagttgcctggcctccagaaagacctcttttatgatggccctgtgccttagtagtatttatgaagacttgaagatgtaccaggtggagttcaagaccatgaatgcaaagcttctgatggatcctaagaggcagatctttctagatcaaaacatgctggcagttattgatgagctgatgcaggccctgaatttcaacagtgagactgtgccacaaaaatcctcccttgaagaaccggatttttataaaactaaaatcaagctctgcatacttcttcatgctttcagaattcgggcagtgactattgatagagtgatgagctatctgaatgcttcctaa

SEQ ID NO: 157 - protein, 20 aa, Artificial Sequence
  PDGF receptor A transmembrane domain amino acid sequence
AVLVLLVIVIISLIVLVVIW

SEQ ID NO: 158 - protein, 21 aa, Artificial Sequence
  PDGF receptor B transmembrane domain amino acid sequence
VVISAILALVVLTIISLIILI

SEQ ID NO: 159 - protein, 24 aa, Artificial Sequence
  Insulin-like growth factor 1 receptor transmembrane domain amino acid sequence
IIIGPPLIFVFLFSVVIGSIYLFL

SEQ ID NO: 160 - protein, 28 aa, Artificial Sequence
  IL-6 receptor transmembrane domain amino acid sequence
SSSVPLPTFLVAGGSLAFGTLLCIAIVL

SEQ ID NO: 161 - protein, 27 aa, Artificial Sequence
  CD28 transmembrane domain amino acid sequence
FWVLVVVGGVLACYSLLVTVAFIIFWV

SEQ ID NO: 162 - RNA, 13 nt, Artificial Sequence
  Sequence comprising a start codon
  misc_feature (1)..(3)
gccgccrccaugg

SEQ ID NO: 163 - protein, 130 aa, Artificial Sequence
  Human IL-15 protein with N-terminal human CD33 leader sequence
MPLLLLLPLLWAGALANWVNVISDLKKIEDLIQSMHIDATLYTESDVHPSCKVTAMKCFLLELQVISLESGDASIHDTVENLIILANNSLSSNGNVTESGCKECEELEEKNIKEFLQSFVHIVQMFINTS

SEQ ID NO: 164 - protein, 16 aa, Artificial Sequence
  Human CD33 leader peptide sequence
MPLLLLLPLLWAGALA

SEQ ID NO: 165 - protein, 134 aa, Artificial Sequence
  Human IL-15 protein with N-terminal human IL-2 leader sequence
MYRMQLLSCIALSLALVTNSNWVNVISDLKKIEDLIQSMHIDATLYTESDVHPSCKVTAMKCFLLELQVISLESGDASIHDTVENLIILANNSLSSNGNVTESGCKECEELEEKNIKEFLQSFVHIVQMFINTS

SEQ ID NO: 166 - protein, 20 aa, Artificial Sequence
  Human IL-2 leader peptide sequence
MYRMQLLSCIALSLALVTNS

SEQ ID NO: 167 - protein, 250 aa, Artificial Sequence
  Protein sequence encoded by NG-748 transgene cassette
MAPRRARGCRTLGLPALLLLLLLRPPATRGITCPPPMSVEHADIWVKSYSLYSRERYICNSGFKRKAGTSSLTECVLNKATNVAHWTTPSLKCIRDGSGATNFSLLKQAGDVEENPGPDWTWRILFLVAAATGAHSNWVNVISDLKKIEDLIQSMHIDATLYTESDVHPSCKVTAMKCFLLELQVISLESGDASIHDTVENLIILANNSLSSNGNVTESGCKECEELEEKNIKEFLQSFVHIVQMFINTS

SEQ ID NO: 168 - protein, 901 aa, Artificial Sequence
  Protein sequence encoded by NG-774 transgene cassette
MPLLLLLPLLWAGALANWVNVISDLKKIEDLIQSMHIDATLYTESDVHPSCKVTAMKCFLLELQVISLESGDASIHDTVENLIILANNSLSSNGNVTESGCKECEELEEKNIKEFLQSFVHIVQMFINTSGSGEGRGSLLTCGDVEENPGPALTFALLVALLVLSCKSSCSVGCDLPQTHSLGSRRTLMLLAQMRRISLFSCLKDRHDFGFPQEEFGNQFQKAETIPVLHEMIQQIFNLFSTKDSSAAWDETLLDKFYTELYQQLNDLEACVIQGVGVTETPLMKEDSILAVRKYFQRITLYLKEKKYSPCAWEVVRAEIMRSFSLSTNLQESLRSKEGSGQCTNYALLKLAGDVESNPGPMCHQQLVISWFSLVFLASPLVAIWELKKDVYVVELDWYPDAPGEMVVLTCDTPEEDGITWTLDQSSEVLGSGKTLTIQVKEFGDAGQYTCHKGGEVLSHSLLLLHKKEDGIWSTDILKDQKEPKNKTFLRCEAKNYSGRFTCWWLTTISTDLTFSVKSSRGSSDPQGVTCGAATLSAERVRGDNKEYEYSVECQEDSACPAAEESLPIEVMVDAVHKLKYENYTSSFFIRDIIKPDPPKNLQLKPLKNSRQVEVSWEYPDTWSTPHSYFSLTFCVQVQGKSKREKKDRVFTDKTSATVICRKNASISVRAQDRYYSSSWSEWASVPCSGGGGSGGGGSGGGGSRNLPVATPDPGMFPCLHHSQNLLRAVSNMLQKARQTLEFYPCTSEEIDHEDITKDKTSTVEACLPLELTKNESCLNSRETSFITNGSCLASRKTSFMMALCLSSIYEDLKMYQVEFKTMNAKLLMDPKRQIFLDQNMLAVIDELMQALNFNSETVPQKSSLEEPDFYKTKIKLCILLHAFRIRAVTIDRVMSYLNAS

SEQ ID NO: 169 - protein, 1051 aa, Artificial Sequence
  Protein sequence encoded by NG-775 transgene cassette
MPLLLLLPLLWAGALANWVNVISDLKKIEDLIQSMHIDATLYTESDVHPSCKVTAMKCFLLELQVISLESGDASIHDTVENLIILANNSLSSNGNVTESGCKECEELEEKNIKEFLQSFVHIVQMFINTSGSGATNFSLLKQAGDVEENPGPALTFALLVALLVLSCKSSCSVGCDLPQTHSLGSRRTLMLLAQMRRISLFSCLKDRHDFGFPQEEFGNQFQKAETIPVLHEMIQQIFNLFSTKDSSAAWDETLLDKFYTELYQQLNDLEACVIQGVGVTETPLMKEDSILAVRKYFQRITLYLKEKKYSPCAWEVVRAEIMRSFSLSTNLQESLRSKEGSGQCTNYALLKLAGDVESNPGPKKSGVLFLLGIILLVLIGVQGTPVVRKGRCSCISTNQGTIHLQSLKDLKQFAPSPSCEKIEIIATLKNGVQTCLNPDSADVKELIKKWEKQVSQKKKQKNGKKHQKKKVLKVRKSQRSRQKKTTGSGVKQTLNFDLLKLAGDVESNPGPMCHQQLVISWFSLVFLASPLVAIWELKKDVYVVELDWYPDAPGEMVVLTCDTPEEDGITWTLDQSSEVLGSGKTLTIQVKEFGDAGQYTCHKGGEVLSHSLLLLHKKEDGIWSTDILKDQKEPKNKTFLRCEAKNYSGRFTCWWLTTISTDLTFSVKSSRGSSDPQGVTCGAATLSAERVRGDNKEYEYSVECQEDSACPAAEESLPIEVMVDAVHKLKYENYTSSFFIRDIIKPDPPKNLQLKPLKNSRQVEVSWEYPDTWSTPHSYFSLTFCVQVQGKSKREKKDRVFTDKTSATVICRKNASISVRAQDRYYSSSWSEWASVPCSGGGGSGGGGSGGGGSRNLPVATPDPGMFPCLHHSQNLLRAVSNMLQKARQTLEFYPCTSEEIDHEDITKDKTSTVEACLPLELTKNESCLNSRETSFITNGSCLASRKTSFMMALCLSSIYEDLKMYQVEFKTMNAKLLMDPKRQIFLDQNMLAVIDELMQALNFNSETVPQKSSLEEPDFYKTKIKLCILLHAFRIRAVTIDRVMSYLNAS

SEQ ID NO: 170 - protein, 905 aa, Artificial Sequence
  Protein sequence encoded by NG-776 transgene cassette
MYRMQLLSCIALSLALVTNSNWVNVISDLKKIEDLIQSMHIDATLYTESDVHPSCKVTAMKCFLLELQVISLESGDASIHDTVENLIILANNSLSSNGNVTESGCKECEELEEKNIKEFLQSFVHIVQMFINTSGSGEGRGSLLTCGDVEENPGPALTFALLVALLVLSCKSSCSVGCDLPQTHSLGSRRTLMLLAQMRRISLFSCLKDRHDFGFPQEEFGNQFQKAETIPVLHEMIQQIFNLFSTKDSSAAWDETLLDKFYTELYQQLNDLEACVIQGVGVTETPLMKEDSILAVRKYFQRITLYLKEKKYSPCAWEVVRAEIMRSFSLSTNLQESLRSKEGSGQCTNYALLKLAGDVESNPGPMCHQQLVISWFSLVFLASPLVAIWELKKDVYVVELDWYPDAPGEMVVLTCDTPEEDGITWTLDQSSEVLGSGKTLTIQVKEFGDAGQYTCHKGGEVLSHSLLLLHKKEDGIWSTDILKDQKEPKNKTFLRCEAKNYSGRFTCWWLTTISTDLTFSVKSSRGSSDPQGVTCGAATLSAERVRGDNKEYEYSVECQEDSACPAAEESLPIEVMVDAVHKLKYENYTSSFFIRDIIKPDPPKNLQLKPLKNSRQVEVSWEYPDTWSTPHSYFSLTFCVQVQGKSKREKKDRVFTDKTSATVICRKNASISVRAQDRYYSSSWSEWASVPCSGGGGSGGGGSGGGGSRNLPVATPDPGMFPCLHHSQNLLRAVSNMLQKARQTLEFYPCTSEEIDHEDITKDKTSTVEACLPLELTKNESCLNSRETSFITNGSCLASRKTSFMMALCLSSIYEDLKMYQVEFKTMNAKLLMDPKRQIFLDQNMLAVIDELMQALNFNSETVPQKSSLEEPDFYKTKIKLCILLHAFRIRAVTIDRVMSYLNAS

SEQ ID NO: 171 - protein, 906 aa, Artificial Sequence
  Protein sequence encoded by NG-777 transgene cassette
MYRMQLLSCIALSLALVTNSNWVNVISDLKKIEDLIQSMHIDATLYTESDVHPSCKVTAMKCFLLELQVISLESGDASIHDTVENLIILANNSLSSNGNVTESGCKECEELEEKNIKEFLQSFVHIVQMFINTSGSGATNFSLLKQAGDVEENPGPALTFALLVALLVLSCKSSCSVGCDLPQTHSLGSRRTLMLLAQMRRISLFSCLKDRHDFGFPQEEFGNQFQKAETIPVLHEMIQQIFNLFSTKDSSAAWDETLLDKFYTELYQQLNDLEACVIQGVGVTETPLMKEDSILAVRKYFQRITLYLKEKKYSPCAWEVVRAEIMRSFSLSTNLQESLRSKEGSGQCTNYALLKLAGDVESNPGPMCHQQLVISWFSLVFLASPLVAIWELKKDVYVVELDWYPDAPGEMVVLTCDTPEEDGITWTLDQSSEVLGSGKTLTIQVKEFGDAGQYTCHKGGEVLSHSLLLLHKKEDGIWSTDILKDQKEPKNKTFLRCEAKNYSGRFTCWWLTTISTDLTFSVKSSRGSSDPQGVTCGAATLSAERVRGDNKEYEYSVECQEDSACPAAEESLPIEVMVDAVHKLKYENYTSSFFIRDIIKPDPPKNLQLKPLKNSRQVEVSWEYPDTWSTPHSYFSLTFCVQVQGKSKREKKDRVFTDKTSATVICRKNASISVRAQDRYYSSSWSEWASVPCSGGGGSGGGGSGGGGSRNLPVATPDPGMFPCLHHSQNLLRAVSNMLQKARQTLEFYPCTSEEIDHEDITKDKTSTVEACLPLELTKNESCLNSRETSFITNGSCLASRKTSFMMALCLSSIYEDLKMYQVEFKTMNAKLLMDPKRQIFLDQNMLAVIDELMQALNFNSETVPQKSSLEEPDFYKTKIKLCILLHAFRIRAVTIDRVMSYLNAS

SEQ ID NO: 172 - protein, 1059 aa, Artificial Sequence
  Protein sequence encoded by NG-781 transgene cassette
MPLLLLLPLLWAGALANWVNVISDLKKIEDLIQSMHIDATLYTESDVHPSCKVTAMKCFLLELQVISLESGDASIHDTVENLIILANNSLSSNGNVTESGCKECEELEEKNIKEFLQSFVHIVQMFINTSGSGEGRGSLLTCGDVEENPGPALTFALLVALLVLSCKSSCSVGCDLPQTHSLGSRRTLMLLAQMRRISLFSCLKDRHDFGFPQEEFGNQFQKAETIPVLHEMIQQIFNLFSTKDSSAAWDETLLDKFYTELYQQLNDLEACVIQGVGVTETPLMKEDSILAVRKYFQRITLYLKEKKYSPCAWEVVRAEIMRSFSLSTNLQESLRSKEGSGQCTNYALLKLAGDVESNPGPAQSLALSLLILVLAFGIPRTQGSDGGAQDCCLKYSQRKIPAKVVRSYRKQEPSLGCSIPAILFLPRKRSQAELCADPKELWVQQLMQHLDKTPSPQKPAQGCRKDRGASKTGKKGKGSKGCKRTERSQTPKGPGSGVKQTLNFDLLKLAGDVESNPGPMCHQQLVISWFSLVFLASPLVAIWELKKDVYVVELDWYPDAPGEMVVLTCDTPEEDGITWTLDQSSEVLGSGKTLTIQVKEFGDAGQYTCHKGGEVLSHSLLLLHKKEDGIWSTDILKDQKEPKNKTFLRCEAKNYSGRFTCWWLTTISTDLTFSVKSSRGSSDPQGVTCGAATLSAERVRGDNKEYEYSVECQEDSACPAAEESLPIEVMVDAVHKLKYENYTSSFFIRDIIKPDPPKNLQLKPLKNSRQVEVSWEYPDTWSTPHSYFSLTFCVQVQGKSKREKKDRVFTDKTSATVICRKNASISVRAQDRYYSSSWSEWASVPCSGGGGSGGGGSGGGGSRNLPVATPDPGMFPCLHHSQNLLRAVSNMLQKARQTLEFYPCTSEEIDHEDITKDKTSTVEACLPLELTKNESCLNSRETSFITNGSCLASRKTSFMMALCLSSIYEDLKMYQVEFKTMNAKLLMDPKRQIFLDQNMLAVIDELMQALNFNSETVPQKSSLEEPDFYKTKIKLCILLHAFRIRAVTIDRVMSYLNAS

SEQ ID NO: 173 - protein, 1030 aa, Artificial Sequence
  Protein sequence encoded by NG-782 transgene cassette
VISDLKKIEDLIQSMHIDATLYTESDVHPSCKVTAMKCFLLELQVISLESGDASIHDTVENLIILANNSLSSNGNVTESGCKECEELEEKNIKEFLQSFVHIVQMFINTSGSGEGRGSLLTCGDVEENPGPALTFALLVALLVLSCKSSCSVGCDLPQTHSLGSRRTLMLLAQMRRISLFSCLKDRHDFGFPQEEFGNQFQKAETIPVLHEMIQQIFNLFSTKDSSAAWDETLLDKFYTELYQQLNDLEACVIQGVGVTETPLMKEDSILAVRKYFQRITLYLKEKKYSPCAWEVVRAEIMRSFSLSTNLQESLRSKEGSGQCTNYALLKLAGDVESNPGPKKSGVLFLLGIILLVLIGVQGTPVVRKGRCSCISTNQGTIHLQSLKDLKQFAPSPSCEKIEIIATLKNGVQTCLNPDSADVKELIKKWEKQVSQKKKQKNGKKHQKKKVLKVRKSQRSRQKKTTGSGVKQTLNFDLLKLAGDVESNPGPMCHQQLVISWFSLVFLASPLVAIWELKKDVYVVELDWYPDAPGEMVVLTCDTPEEDGITWTLDQSSEVLGSGKTLTIQVKEFGDAGQYTCHKGGEVLSHSLLLLHKKEDGIWSTDILKDQKEPKNKTFLRCEAKNYSGRFTCWWLTTISTDLTFSVKSSRGSSDPQGVTCGAATLSAERVRGDNKEYEYSVECQEDSACPAAEESLPIEVMVDAVHKLKYENYTSSFFIRDIIKPDPPKNLQLKPLKNSRQVEVSWEYPDTWSTPHSYFSLTFCVQVQGKSKREKKDRVFTDKTSATVICRKNASISVRAQDRYYSSSWSEWASVPCSGGGGSGGGGSGGGGSRNLPVATPDPGMFPCLHHSQNLLRAVSNMLQKARQTLEFYPCTSEEIDHEDITKDKTSTVEACLPLELTKNESCLNSRETSFITNGSCLASRKTSFMMALCLSSIYEDLKMYQVEFKTMNAKLLMDPKRQIFLDQNMLAVIDELMQALNFNSETVPQKSSLEEPDFYKTKIKLCILLHAFRIRAVTIDRVMSYLNAS

SEQ ID NO: 174 - protein, 1050 aa, Artificial Sequence
  Protein sequence encoded by NG-784 transgene cassette
MKKSGVLFLLGIILLVLIGVQGTPVVRKGRCSCISTNQGTIHLQSLKDLKQFAPSPSCEKIEIIATLKNGVQTCLNPDSADVKELIKKWEKQVSQKKKQKNGKKHQKKKVLKVRKSQRSRQKKTTGSGVKQTLNFDLLKLAGDVESNPGPALTFALLVALLVLSCKSSCSVGCDLPQTHSLGSRRTLMLLAQMRRISLFSCLKDRHDFGFPQEEFGNQFQKAETIPVLHEMIQQIFNLFSTKDSSAAWDETLLDKFYTELYQQLNDLEACVIQGVGVTETPLMKEDSILAVRKYFQRITLYLKEKKYSPCAWEVVRAEIMRSFSLSTNLQESLRSKEGSGQCTNYALLKLAGDVESNPGPPLLLLLPLLWAGALANWVNVISDLKKIEDLIQSMHIDATLYTESDVHPSCKVTAMKCFLLELQVISLESGDASIHDTVENLIILANNSLSSNGNVTESGCKECEELEEKNIKEFLQSFVHIVQMFINTSGSGEGRGSLLTCGDVEENPGPMCHQQLVISWFSLVFLASPLVAIWELKKDVYVVELDWYPDAPGEMVVLTCDTPEEDGITWTLDQSSEVLGSGKTLTIQVKEFGDAGQYTCHKGGEVLSHSLLLLHKKEDGIWSTDILKDQKEPKNKTFLRCEAKNYSGRFTCWWLTTISTDLTFSVKSSRGSSDPQGVTCGAATLSAERVRGDNKEYEYSVECQEDSACPAAEESLPIEVMVDAVHKLKYENYTSSFFIRDIIKPDPPKNLQLKPLKNSRQVEVSWEYPDTWSTPHSYFSLTFCVQVQGKSKREKKDRVFTDKTSATVICRKNASISVRAQDRYYSSSWSEWASVPCSGGGGSGGGGSGGGGSRNLPVATPDPGMFPCLHHSQNLLRAVSNMLQKARQTLEFYPCTSEEIDHEDITKDKTSTVEACLPLELTKNESCLNSRETSFITNGSCLASRKTSFMMALCLSSIYEDLKMYQVEFKTMNAKLLMDPKRQIFLDQNMLAVIDELMQALNFNSETVPQKSSLEEPDFYKTKIKLCILLHAFRIRAVTIDRVMSYLNAS

SEQ ID NO: 175 - protein, 869 aa, Artificial Sequence
  Protein sequence encoded by NG-785 transgene cassette
MCHQQLVISWFSLVFLASPLVAIWELKKDVYVVELDWYPDAPGEMVVLTCDTPEEDGITWTLDQSSEVLGSGKTLTIQVKEFGDAGQYTCHKGGEVLSHSLLLLHKKEDGIWSTDILKDQKEPKNKTFLRCEAKNYSGRFTCWWLTTISTDLTFSVKSSRGSSDPQGVTCGAATLSAERVRGDNKEYEYSVECQEDSACPAAEESLPIEVMVDAVHKLKYENYTSSFFIRDIIKPDPPKNLQLKPLKNSRQVEVSWEYPDTWSTPHSYFSLTFCVQVQGKSKREKKDRVFTDKTSATVICRKNASISVRAQDRYYSSSWSEWASVPCSGGGGSGGGGSGGGGSRNLPVATPDPGMFPCLHHSQNLLRAVSNMLQKARQTLEFYPCTSEEIDHEDITKDKTSTVEACLPLELTKNESCLNSRETSFITNGSCLASRKTSFMMALCLSSIYEDLKMYQVEFKTMNAKLLMDPKRQIFLDQNMLAVIDELMQALNFNSETVPQKSSLEEPDFYKTKIKLCILLHAFRIRAVTIDRVMSYLNASGSGEGRGSLLTCGDVEENPGPAPRRARGCRTLGLPALLLLLLLRPPATRGITCPPPMSVEHADIWVKSYSLYSRERYICNSGFKRKAGTSSLTECVLNKATNVAHWTTPSLKCIRDEQKLISEEDLAVGQDTQEVIVVPHSLPFKVVVISAILALVVLTIISLIILIMLWQKKPRGSGATNFSLLKQAGDVEENPGPDWTWRILFLVAAATGAHSNWVNVISDLKKIEDLIQSMHIDATLYTESDVHPSCKVTAMKCFLLELQVISLESGDASIHDTVENLIILANNSLSSNGNVTESGCKECEELEEKNIKEFLQSFVHIVQMFINTS

SEQ ID NO: 176 - protein, 869 aa, Artificial Sequence; identical to SEQ ID NO: 175
  Protein sequence encoded by NG-785A transgene cassette

SEQ ID NO: 177 - protein, 810 aa, Artificial Sequence
  Protein sequence encoded by NG-786A transgene cassette
MCHQQLVISWFSLVFLASPLVAIWELKKDVYVVELDWYPDAPGEMVVLTCDTPEEDGITWTLDQSSEVLGSGKTLTIQVKEFGDAGQYTCHKGGEVLSHSLLLLHKKEDGIWSTDILKDQKEPKNKTFLRCEAKNYSGRFTCWWLTTISTDLTFSVKSSRGSSDPQGVTCGAATLSAERVRGDNKEYEYSVECQEDSACPAAEESLPIEVMVDAVHKLKYENYTSSFFIRDIIKPDPPKNLQLKPLKNSRQVEVSWEYPDTWSTPHSYFSLTFCVQVQGKSKREKKDRVFTDKTSATVICRKNASISVRAQDRYYSSSWSEWASVPCSGGGGSGGGGSGGGGSRNLPVATPDPGMFPCLHHSQNLLRAVSNMLQKARQTLEFYPCTSEEIDHEDITKDKTSTVEACLPLELTKNESCLNSRETSFITNGSCLASRKTSFMMALCLSSIYEDLKMYQVEFKTMNAKLLMDPKRQIFLDQNMLAVIDELMQALNFNSETVPQKSSLEEPDFYKTKIKLCILLHAFRIRAVTIDRVMSYLNASGSGEGRGSLLTCGDVEENPGPAPRRARGCRTLGLPALLLLLLLRPPATRGITCPPPMSVEHADIWVKSYSLYSRERYICNSGFKRKAGTSSLTECVLNKATNVAHWTTPSLKCIRDGSGATNFSLLKQAGDVEENPGPDWTWRILFLVAAATGAHSNWVNVISDLKKIEDLIQSMHIDATLYTESDVHPSCKVTAMKCFLLELQVISLESGDASIHDTVENLIILANNSLSSNGNVTESGCKECEELEEKNIKEFLQSFVHIVQMFINTS

SEQ ID NO: 178 - protein, 785 aa, Artificial Sequence
  Protein sequence encoded by NG-787 transgene cassette
MCHQQLVISWFSLVFLASPLVAIWELKKDVYVVELDWYPDAPGEMVVLTCDTPEEDGITWTLDQSSEVLGSGKTLTIQVKEFGDAGQYTCHKGGEVLSHSLLLLHKKEDGIWSTDILKDQKEPKNKTFLRCEAKNYSGRFTCWWLTTISTDLTFSVKSSRGSSDPQGVTCGAATLSAERVRGDNKEYEYSVECQEDSACPAAEESLPIEVMVDAVHKLKYENYTSSFFIRDIIKPDPPKNLQLKPLKNSRQVEVSWEYPDTWSTPHSYFSLTFCVQVQGKSKREKKDRVFTDKTSATVICRKNASISVRAQDRYYSSSWSEWASVPCSGGGGSGGGGSGGGGSRNLPVATPDPGMFPCLHHSQNLLRAVSNMLQKARQTLEFYPCTSEEIDHEDITKDKTSTVEACLPLELTKNESCLNSRETSFITNGSCLASRKTSFMMALCLSSIYEDLKMYQVEFKTMNAKLLMDPKRQIFLDQNMLAVIDELMQALNFNSETVPQKSSLEEPDFYKTKIKLCILLHAFRIRAVTIDRVMSYLNASGSGEGRGSLLTCGDVEENPGPDWTWRILFLVAAATGAHSNWVNVISDLKKIEDLIQSMHIDATLYTESDVHPSCKVTAMKCFLLELQVISLESGDASIHDTVENLIILANNSLSSNGNVTESGCKECEELEEKNIKEFLQSFVHIVQMFINTSSGGGSGGGGSGGGGSGGGGSGGGSLQITCPPPMSVEHADIWVKSYSLYSRERYICNSGFKRKAGTSSLTECVLNKATNVAHWTTPSLKCIRD

SEQ ID NO: 179 - protein, 785 aa, Artificial Sequence; identical to SEQ ID NO: 178
  Protein sequence encoded by NG-787A transgene cassette

SEQ ID NO: 180 - protein, 965 aa, Artificial Sequence
  Protein sequence encoded by NG-788P transgene cassette
MCHQQLVISWFSLVFLASPLVAIWELKKDVYVVELDWYPDAPGEMVVLTCDTPEEDGITWTLDQSSEVLGSGKTLTIQVKEFGDAGQYTCHKGGEVLSHSLLLLHKKEDGIWSTDILKDQKEPKNKTFLRCEAKNYSGRFTCWWLTTISTDLTFSVKSSRGSSDPQGVTCGAATLSAERVRGDNKEYEYSVECQEDSACPAAEESLPIEVMVDAVHKLKYENYTSSFFIRDIIKPDPPKNLQLKPLKNSRQVEVSWEYPDTWSTPHSYFSLTFCVQVQGKSKREKKDRVFTDKTSATVICRKNASISVRAQDRYYSSSWSEWASVPCSGGGGSGGGGSGGGGSRNLPVATPDPGMFPCLHHSQNLLRAVSNMLQKARQTLEFYPCTSEEIDHEDITKDKTSTVEACLPLELTKNESCLNSRETSFITNGSCLASRKTSFMMALCLSSIYEDLKMYQVEFKTMNAKLLMDPKRQIFLDQNMLAVIDELMQALNFNSETVPQKSSLEEPDFYKTKIKLCILLHAFRIRAVTIDRVMSYLNASGSGEGRGSLLTCGDVEENPGPAQSLALSLLILVLAFGIPRTQGSDGGAQDCCLKYSQRKIPAKVVRSYRKQEPSLGCSIPAILFLPRKRSQAELCADPKELWVQQLMQHLDKTPSPQKPAQGCRKDRGASKTGKKGKGSKGCKRTERSQTPKGPGSGQCTNYALLKLAGDVESNPGPMAPRRARGCRTLGLPALLLLLLLRPPATRGITCPPPMSVEHADIWVKSYSLYSRERYICNSGFKRKAGTSSLTECVLNKATNVAHWTTPSLKCIRDGSGATNFSLLKQAGDVEENPGPMPLLLLLPLLWAGALANWVNVISDLKKIEDLIQSMHIDATLYTESDVHPSCKVTAMKCFLLELQVISLESGDASIHDTVENLIILANNSLSSNGNVTESGCKECEELEEKNIKEFLQSFVHIVQMFINTS

SEQ ID NO: 181 - protein, 956 aa, Artificial Sequence
  Protein sequence encoded by NG-789P transgene cassette
MCHQQLVISWFSLVFLASPLVAIWELKKDVYVVELDWYPDAPGEMVVLTCDTPEEDGITWTLDQSSEVLGSGKTLTIQVKEFGDAGQYTCHKGGEVLSHSLLLLHKKEDGIWSTDILKDQKEPKNKTFLRCEAKNYSGRFTCWWLTTISTDLTFSVKSSRGSSDPQGVTCGAATLSAERVRGDNKEYEYSVECQEDSACPAAEESLPIEVMVDAVHKLKYENYTSSFFIRDIIKPDPPKNLQLKPLKNSRQVEVSWEYPDTWSTPHSYFSLTFCVQVQGKSKREKKDRVFTDKTSATVICRKNASISVRAQDRYYSSSWSEWASVPCSGGGGSGGGGSGGGGSRNLPVATPDPGMFPCLHHSQNLLRAVSNMLQKARQTLEFYPCTSEEIDHEDITKDKTSTVEACLPLELTKNESCLNSRETSFITNGSCLASRKTSFMMALCLSSIYEDLKMYQVEFKTMNAKLLMDPKRQIFLDQNMLAVIDELMQALNFNSETVPQKSSLEEPDFYKTKIKLCILLHAFRIRAVTIDRVMSYLNASGSGEGRGSLLTCGDVEENPGPKKSGVLFLLGIILLVLIGVQGTPVVRKGRCSCISTNQGTIHLQSLKDLKQFAPSPSCEKIEIIATLKNGVQTCLNPDSADVKELIKKWEKQVSQKKKQKNGKKHQKKKVLKVRKSQRSRQKKTTGSGQCTNYALLKLAGDVESNPGPMAPRRARGCRTLGLPALLLLLLLRPPATRGITCPPPMSVEHADIWVKSYSLYSRERYICNSGFKRKAGTSSLTECVLNKATNVAHWTTPSLKCIRDGSGATNFSLLKQAGDVEENPGPMPLLLLLPLLWAGALANWVNVISDLKKIEDLIQSMHIDATLYTESDVHPSCKVTAMKCFLLELQVISLESGDASIHDTVENLIILANNSLSSNGNVTESGCKECEELEEKNIKEFLQSFVHIVQMFINTS

SEQ ID NO: 182 - protein, 1114 aa, Artificial Sequence
  Protein sequence encoded by NG-790P transgene cassette
MCHQQLVISWFSLVFLASPLVAIWELKKDVYVVELDWYPDAPGEMVVLTCDTPEEDGITWTLDQSSEVLGSGKTLTIQVKEFGDAGQYTCHKGGEVLSHSLLLLHKKEDGIWSTDILKDQKEPKNKTFLRCEAKNYSGRFTCWWLTTISTDLTFSVKSSRGSSDPQGVTCGAATLSAERVRGDNKEYEYSVECQEDSACPAAEESLPIEVMVDAVHKLKYENYTSSFFIRDIIKPDPPKNLQLKPLKNSRQVEVSWEYPDTWSTPHSYFSLTFCVQVQGKSKREKKDRVFTDKTSATVICRKNASISVRAQDRYYSSSWSEWASVPCSGGGGSGGGGSGGGGSRNLPVATPDPGMFPCLHHSQNLLRAVSNMLQKARQTLEFYPCTSEEIDHEDITKDKTSTVEACLPLELTKNESCLNSRETSFITNGSCLASRKTSFMMALCLSSIYEDLKMYQVEFKTMNAKLLMDPKRQIFLDQNMLAVIDELMQALNFNSETVPQKSSLEEPDFYKTKIKLCILLHAFRIRAVTIDRVMSYLNASGSGEGRGSLLTCGDVEENPGPKKSGVLFLLGIILLVLIGVQGTPVVRKGRCSCISTNQGTIHLQSLKDLKQFAPSPSCEKIEIIATLKNGVQTCLNPDSADVKELIKKWEKQVSQKKKQKNGKKHQKKKVLKVRKSQRSRQKKTTGSGVKQTLNFDLLKLAGDVESNPGPAQSLALSLLILVLAFGIPRTQGSDGGAQDCCLKYSQRKIPAKVVRSYRKQEPSLGCSIPAILFLPRKRSQAELCADPKELWVQQLMQHLDKTPSPQKPAQGCRKDRGASKTGKKGKGSKGCKRTERSQTPKGPGSGQCTNYALLKLAGDVESNPGPMAPRRARGCRTLGLPALLLLLLLRPPATRGITCPPPMSVEHADIWVKSYSLYSRERYICNSGFKRKAGTSSLTECVLNKATNVAHWTTPSLKCIRDGSGATNFSLLKQAGDVEENPGPMPLLLLLPLLWAGALANWVNVISDLKKIEDLIQSMHIDATLYTESDVHPSCKVTAMKCFLLELQVISLESGDASIHDTVENLIILANNSLSSNGNVTESGCKECEELEEKNIKEFLQSFVHIVQMFINTS

SEQ ID NO: 183 - protein, 957 aa, Artificial Sequence
  Protein sequence encoded by NG-791A transgene cassette
MCHQQLVISWFSLVFLASPLVAIWELKKDVYVVELDWYPDAPGEMVVLTCDTPEEDGITWTLDQSSEVLGSGKTLTIQVKEFGDAGQYTCHKGGEVLSHSLLLLHKKEDGIWSTDILKDQKEPKNKTFLRCEAKNYSGRFTCWWLTTISTDLTFSVKSSRGSSDPQGVTCGAATLSAERVRGDNKEYEYSVECQEDSACPAAEESLPIEVMVDAVHKLKYENYTSSFFIRDIIKPDPPKNLQLKPLKNSRQVEVSWEYPDTWSTPHSYFSLTFCVQVQGKSKREKKDRVFTDKTSATVICRKNASISVRAQDRYYSSSWSEWASVPCSGGGGSGGGGSGGGGSRNLPVATPDPGMFPCLHHSQNLLRAVSNMLQKARQTLEFYPCTSEEIDHEDITKDKTSTVEACLPLELTKNESCLNSRETSFITNGSCLASRKTSFMMALCLSSIYEDLKMYQVEFKTMNAKLLMDPKRQIFLDQNMLAVIDELMQALNFNSETVPQKSSLEEPDFYKTKIKLCILLHAFRIRAVTIDRVMSYLNASGSGEGRGSLLTCGDVEENPGPKKSGVLFLLGIILLVLIGVQGTPVVRKGRCSCISTNQGTIHLQSLKDLKQFAPSPSCEKIEIIATLKNGVQTCLNPDSADVKELIKKWEKQVSQKKKQKNGKKHQKKKVLKVRKSQRSRQKKTTGSGQCTNYALLKLAGDVESNPGPAPRRARGCRTLGLPALLLLLLLRPPATRGITCPPPMSVEHADIWVKSYSLYSRERYICNSGFKRKAGTSSLTECVLNKATNVAHWTTPSLKCIRDGSGATNFSLLKQAGDVEENPGPDWTWRILFLVAAATGAHSNWVNVISDLKKIEDLIQSMHIDATLYTESDVHPSCKVTAMKCFLLELQVISLESGDASIHDTVENLIILANNSLSSNGNVTESGCKECEELEEKNIKEFLQSFVHIVQMFINTS

SEQ ID NO: 184 - protein, 1020 aa, Artificial Sequence
  Protein sequence encoded by NG-792A transgene cassette
MCHQQLVISWFSLVFLASPLVAIWELKKDVYVVELDWYPDAPGEMVVLTCDTPEEDGITWTLDQSSEVLGSGKTLTIQVKEFGDAGQYTCHKGGEVLSHSLLLLHKKEDGIWSTDILKDQKEPKNKTFLRCEAKNYSGRFTCWWLTTISTDLTFSVKSSRGSSDPQGVTCGAATLSAERVRGDNKEYEYSVECQEDSACPAAEESLPIEVMVDAVHKLKYENYTSSFFIRDIIKPDPPKNLQLKPLKNSRQVEVSWEYPDTWSTPHSYFSLTFCVQVQGKSKREKKDRVFTDKTSATVICRKNASISVRAQDRYYSSSWSEWASVPCSGGGGSGGGGSGGGGSRNLPVATPDPGMFPCLHHSQNLLRAVSNMLQKARQTLEFYPCTSEEIDHEDITKDKTSTVEACLPLELTKNESCLNSRETSFITNGSCLASRKTSFMMALCLSSIYEDLKMYQVEFKTMNAKLLMDPKRQIFLDQNMLAVIDELMQALNFNSETVPQKSSLEEPDFYKTKIKLCILLHAFRIRAVTIDRVMSYLNASGSGEGRGSLLTCGDVEENPGPALTFALLVALLVLSCKSSCSVGCDLPQTHSLGSRRTLMLLAQMRRISLFSCLKDRHDFGFPQEEFGNQFQKAETIPVLHEMIQQIFNLFSTKDSSAAWDETLLDKFYTELYQQLNDLEACVIQGVGVTETPLMKEDSILAVRKYFQRITLYLKEKKYSPCAWEVVRAEIMRSFSLSTNLQESLRSKEGSGQCTNYALLKLAGDVESNPGPAPRRARGCRTLGLPALLLLLLLRPPATRGITCPPPMSVEHADIWVKSYSLYSRERYICNSGFKRKAGTSSLTECVLNKATNVAHWTTPSLKCIRDGSGATNFSLLKQAGDVEENPGPDWTWRILFLVAAATGAHSNWVNVISDLKKIEDLIQSMHIDATLYTESDVHPSCKVTAMKCFLLELQVISLESGDASIHDTVENLIILANNSLSSNGNVTESGCKECEELEEKNIKEFLQSFVHIVQMFINTS

SEQ ID NO: 185 - protein, 958 aa, Artificial Sequence
  Protein sequence encoded by NG-794A transgene cassette
MKKSGVLFLLGIILLVLIGVQGTPVVRKGRCSCISTNQGTIHLQSLKDLKQFAPSPSCEKIEIIATLKNGVQTCLNPDSADVKELIKKWEKQVSQKKKQKNGKKHQKKKVLKVRKSQRSRQKKTTGSGQCTNYALLKLAGDVESNPGPMCHQQLVISWFSLVFLASPLVAIWELKKDVYVVELDWYPDAPGEMVVLTCDTPEEDGITWTLDQSSEVLGSGKTLTIQVKEFGDAGQYTCHKGGEVLSHSLLLLHKKEDGIWSTDILKDQKEPKNKTFLRCEAKNYSGRFTCWWLTTISTDLTFSVKSSRGSSDPQGVTCGAATLSAERVRGDNKEYEYSVECQEDSACPAAEESLPIEVMVDAVHKLKYENYTSSFFIRDIIKPDPPKNLQLKPLKNSRQVEVSWEYPDTWSTPHSYFSLTFCVQVQGKSKREKKDRVFTDKTSATVICRKNASISVRAQDRYYSSSWSEWASVPCSGGGGSGGGGSGGGGSRNLPVATPDPGMFPCLHHSQNLLRAVSNMLQKARQTLEFYPCTSEEIDHEDITKDKTSTVEACLPLELTKNESCLNSRETSFITNGSCLASRKTSFMMALCLSSIYEDLKMYQVEFKTMNAKLLMDPKRQIFLDQNMLAVIDELMQALNFNSETVPQKSSLEEPDFYKTKIKLCILLHAFRIRAVTIDRVMSYLNASGSGEGRGSLLTCGDVEENPGPAPRRARGCRTLGLPALLLLLLLRPPATRGITCPPPMSVEHADIWVKSYSLYSRERYICNSGFKRKAGTSSLTECVLNKATNVAHWTTPSLKCIRDGSGATNFSLLKQAGDVEENPGPDWTWRILFLVAAATGAHSNWVNVISDLKKIEDLIQSMHIDATLYTESDVHPSCKVTAMKCFLLELQVISLESGDASIHDTVENLIILANNSLSSNGNVTESGCKECEELEEKNIKEFLQSFVHIVQMFINTS

SEQ ID NO: 186 - protein, 1025 aa, Artificial Sequence
  Protein sequence encoded by NG-795A transgene cassette
MCHQQLVISWFSLVFLASPLVAIWELKKDVYVVELDWYPDAPGEMVVLTCDTPEEDGITWTLDQSSEVLGSGKTLTIQVKEFGDAGQYTCHKGGEVLSHSLLLLHKKEDGIWSTDILKDQKEPKNKTFLRCEAKNYSGRFTCWWLTTISTDLTFSVKSSRGSSDPQGVTCGAATLSAERVRGDNKEYEYSVECQEDSACPAAEESLPIEVMVDAVHKLKYENYTSSFFIRDIIKPDPPKNLQLKPLKNSRQVEVSWEYPDTWSTPHSYFSLTFCVQVQGKSKREKKDRVFTDKTSATVICRKNASISVRAQDRYYSSSWSEWASVPCSGGGGSGGGGSGGGGSRNLPVATPDPGMFPCLHHSQNLLRAVSNMLQKARQTLEFYPCTSEEIDHEDITKDKTSTVEACLPLELTKNESCLNSRETSFITNGSCLASRKTSFMMALCLSSIYEDLKMYQVEFKTMNAKLLMDPKRQIFLDQNMLAVIDELMQALNFNSETVPQKSSLEEPDFYKTKIKLCILLHAFRIRAVTIDRVMSYLNASGSGEGRGSLLTCGDVEENPGPAQSLALSLLILVLAFGIPRTQGSDGGAQDCCLKYSQRKIPAKVVRSYRKQEPSLGCSIPAILFLPRKRSQAELCADPKELWVQQLMQHLDKTPSPQKPAQGCRKDRGASKTGKKGKGSKGCKRTERSQTPKGPGSGQCTNYALLKLAGDVESNPGPAPRRARGCRTLGLPALLLLLLLRPPATRGITCPPPMSVEHADIWVKSYSLYSRERYICNSGFKRKAGTSSLTECVLNKATNVAHWTTPSLKCIRDEQKLISEEDLAVGQDTQEVIVVPHSLPFKVVVISAILALVVLTIISLIILIMLWQKKPRGSGATNFSLLKQAGDVEENPGPDWTWRILFLVAAATGAHSNWVNVISDLKKIEDLIQSMHIDATLYTESDVHPSCKVTAMKCFLLELQVISLESGDASIHDTVENLIILANNSLSSNGNVTESGCKECEELEEKNIKEFLQSFVHIVQMFINTS

SEQ ID NO: 187 - protein, 966 aa, Artificial Sequence
  Protein sequence encoded by NG-796A transgene cassette
MCHQQLVISWFSLVFLASPLVAIWELKKDVYVVELDWYPDAPGEMVVLTCDTPEEDGITWTLDQSSEVLGSGKTLTIQVKEFGDAGQYTCHKGGEVLSHSLLLLHKKEDGIWSTDILKDQKEPKNKTFLRCEAKNYSGRFTCWWLTTISTDLTFSVKSSRGSSDPQGVTCGAATLSAERVRGDNKEYEYSVECQEDSACPAAEESLPIEVMVDAVHKLKYENYTSSFFIRDIIKPDPPKNLQLKPLKNSRQVEVSWEYPDTWSTPHSYFSLTFCVQVQGKSKREKKDRVFTDKTSATVICRKNASISVRAQDRYYSSSWSEWASVPCSGGGGSGGGGSGGGGSRNLPVATPDPGMFPCLHHSQNLLRAVSNMLQKARQTLEFYPCTSEEIDHEDITKDKTSTVEACLPLELTKNESCLNSRETSFITNGSCLASRKTSFMMALCLSSIYEDLKMYQVEFKTMNAKLLMDPKRQIFLDQNMLAVIDELMQALNFNSETVPQKSSLEEPDFYKTKIKLCILLHAFRIRAVTIDRVMSYLNASGSGEGRGSLLTCGDVEENPGPAQSLALSLLILVLAFGIPRTQGSDGGAQDCCLKYSQRKIPAKVVRSYRKQEPSLGCSIPAILFLPRKRSQAELCADPKELWVQQLMQHLDKTPSPQKPAQGCRKDRGASKTGKKGKGSKGCKRTERSQTPKGPGSGQCTNYALLKLAGDVESNPGPAPRRARGCRTLGLPALLLLLLLRPPATRGITCPPPMSVEHADIWVKSYSLYSRERYICNSGFKRKAGTSSLTECVLNKATNVAHWTTPSLKCIRDGSGATNFSLLKQAGDVEENPGPDWTWRILFLVAAATGAHSNWVNVISDLKKIEDLIQSMHIDATLYTESDVHPSCKVTAMKCFLLELQVISLESGDASIHDTVENLIILANNSLSSNGNVTESGCKECEELEEKNIKEFLQSFVHIVQMFINTS

SEQ ID NO: 188 - protein, 967 aa, Artificial Sequence
  Protein sequence encoded by NG-799A transgene cassette
MAQSLALSLLILVLAFGIPRTQGSDGGAQDCCLKYSQRKIPAKVVRSYRKQEPSLGCSIPAILFLPRKRSQAELCADPKELWVQQLMQHLDKTPSPQKPAQGCRKDRGASKTGKKGKGSKGCKRTERSQTPKGPGSGQCTNYALLKLAGDVESNPGPAPRRARGCRTLGLPALLLLLLLRPPATRGITCPPPMSVEHADIWVKSYSLYSRERYICNSGFKRKAGTSSLTECVLNKATNVAHWTTPSLKCIRDGSGATNFSLLKQAGDVEENPGPDWTWRILFLVAAATGAHSNWVNVISDLKKIEDLIQSMHIDATLYTESDVHPSCKVTAMKCFLLELQVISLESGDASIHDTVENLIILANNSLSSNGNVTESGCKECEELEEKNIKEFLQSFVHIVQMFINTSGSGEGRGSLLTCGDVEENPGPMCHQQLVISWFSLVFLASPLVAIWELKKDVYVVELDWYPDAPGEMVVLTCDTPEEDGITWTLDQSSEVLGSGKTLTIQVKEFGDAGQYTCHKGGEVLSHSLLLLHKKEDGIWSTDILKDQKEPKNKTFLRCEAKNYSGRFTCWWLTTISTDLTFSVKSSRGSSDPQGVTCGAATLSAERVRGDNKEYEYSVECQEDSACPAAEESLPIEVMVDAVHKLKYENYTSSFFIRDIIKPDPPKNLQLKPLKNSRQVEVSWEYPDTWSTPHSYFSLTFCVQVQGKSKREKKDRVFTDKTSATVICRKNASISVRAQDRYYSSSWSEWASVPCSGGGGSGGGGSGGGGSRNLPVATPDPGMFPCLHHSQNLLRAVSNMLQKARQTLEFYPCTSEEIDHEDITKDKTSTVEACLPLELTKNESCLNSRETSFITNGSCLASRKTSFMMALCLSSIYEDLKMYQVEFKTMNAKLLMDPKRQIFLDQNMLAVIDELMQALNFNSETVPQKSSLEEPDFYKTKIKLCILLHAFRIRAVTIDRVMSYLNAS

SEQ ID NO: 189 - DNA, 753 bp, Artificial Sequence
  DNA sequence for the protein coding sequence of the NG-748 transgene cassette, including the stop codon
atggccccgcggcgggcgcgcggctgccggaccctcggtctcccggcgctgctactgctgctgctgctccggccgccggcgacgcggggcatcacgtgccctccccccatgtccgtggaacacgcagacatctgggtcaagagctacagcttgtactccagggagcggtacatttgtaactctggtttcaagcgtaaagccggcacgtccagcctgacggagtgcgtgttgaacaaggccacgaatgtcgcccactggacaacccccagtctcaaatgcattagagacggaagcggagctactaacttcagcctgctgaagcaggctggagacgtggaggagaaccctggacctgactggacctggcgcatcctgttcttggtggcagctgctacgggagctcattccaactgggtgaatgtaataagtgatttgaaaaaaattgaagatcttattcaatctatgcatattgatgctactttatatacggaaagtgatgttcaccccagttgcaaagtaacagcaatgaagtgctttctcttggagttacaagttatttcacttgagtccggagatgcaagtattcatgatacagtagaaaatctgatcatcctagcaaacaacagtttgtcttctaatgggaatgtaacagaatctggatgcaaagaatgtgaggaactggaggaaaaaaatattaaagaatttttgcagagttttgtacatattgtccaaatgttcatcaacacttcttaa

SEQ ID NO: 190 - DNA, 2706 bp, Artificial Sequence
  DNA sequence for the protein coding sequence of the NG-774 transgene cassette, including the stop codon
atgccgctgctgctactgctgcccctgctgtgggcaggggccctggctaactgggtgaatgtaataagtgatttgaaaaaaattgaagatcttattcaatctatgcatattgatgctactttatatacggaaagtgatgttcaccccagttgcaaagtaacagcaatgaagtgctttctcttggagttacaagttatttcacttgagtccggagatgcaagtattcatgatacagtagaaaatctgatcatcctagcaaacaacagtttgtcttctaatgggaatgtaacagaatctggatgcaaagaatgtgaggaactggaggaaaaaaatattaaagaatttttgcagagttttgtacatattgtccaaatgttcatcaacacttctggaagcggagagggcagaggaagtctgctaacatgcggtgacgtcgaggagaatcctggacctgccttgacctttgctttactggtggccctcctggtgctcagctgcaagtcaagctgctctgtgggctgtgatctgcctcaaacccacagcctgggtagcaggaggaccttgatgctcctggcacagatgaggagaatctctcttttctcctgcttgaaggacagacatgactttggatttccccaggaggagtttggcaaccagttccaaaaggctgaaaccatccctgtcctccatgagatgatccagcagatcttcaatctcttcagcacaaaggactcatctgctgcttgggatgagaccctcctagacaaattctacactgaactctaccagcagctgaatgacctggaagcctgtgtgatacagggggtgggggtgacagagactcccctgatgaaggaggactccattctggctgtgaggaaatacttccaaagaatcactctctatctgaaagagaagaaatacagcccttgtgcctgggaggttgtcagagcagaaatcatgagatctttttctttgtcaacaaacttgcaagaaagtttaagaagtaaggaaggaagcggacagtgtactaattatgctctcttgaaattggctggagatgttgagagcaaccctggacctatgtgtcaccagcagttggtcatctcttggttttccctggtttttctggcatctcccctcgtggccatatgggaactgaagaaagatgtttatgtcgtagaattggattggtatccggatgcccctggagaaatggtggtcctcacctgtgacacccctgaagaagatggtatcacctggaccttggaccagagcagtgaggtcttaggctctggcaaaaccctgaccatccaagtcaaagagtttggagatgctggccagtacacctgtcacaaaggaggcgaggttctaagccattcgctcctgctgcttcacaaaaaggaagatggaatttggtccactgatattttaaaggaccagaaagaacccaaaaataagacctttctaagatgcgaggccaagaattattctggacgtttcacctgctggtggctgacgacaatcagtactgatttgacattcagtgtcaaaagcagcagaggctcttctgacccccaaggggtgacgtgcggagctgctacactctctgcagagagagtcagaggggacaacaaggagtatgagtactcagtggagtgccaggaggacagtgcctgcccagctgctgaggagagtctgcccattgaggtcatggtggatgccgttcacaagctcaagtatgaaaactacaccagcagcttcttcatcagggacatcatcaaacctgacccacccaagaacttgcagctgaagccattaaagaattctcggcaggtggaggtcagctgggagtaccctgacacctggagtactccacattcctacttctccctgacattctgcgttcaggtccagggcaagagcaagagagaaaagaaagatagagtcttcacggacaagacctcagccacggtcatctgccgcaaaaatgccagcattagcgtgcgggcccaggaccgctactatagctcatcttggagcgaatgggcatctgtgccctgcagtggagggggcggcagcgggggaggcggcagcggcggcgggggatcgagaaacctccccgtggccactccagacccaggaatgttcccatgccttcaccactcccaaaacctgctgagggccgtcagcaacatgctccagaaggccagacaaactctagaattttacccttgcacttctgaagagattgatcatgaagatatcacaaaagataaaaccagcacagtggaggcctgtttaccattggaattaaccaagaatgagagttgcctaaattccagagagacctctttcataactaatgggagttgcctggcctccagaaagacctcttttatgatggccctgtgccttagtagtatttatgaagacttgaagatgtaccaggtggagttcaagaccatgaatgcaaagcttctgatggatcctaagaggcagatctttctagatcaaaacatgctggcagttattgatgagctgatgcaggccctgaatttcaacagtgagactgtgccacaaaaatcctcccttgaagaaccggatttttataaaactaaaatcaagctctgcatacttcttcatgctttcagaattcgggcagtgactattgatagagtgatgagctatctgaatgcttcctaa

SEQ ID NO: 191 - DNA, 2709 bp, Artificial Sequence
  DNA sequence for the protein coding sequence of the NG-775 transgene cassette, including the stop codon
atgccgctgctgctactgctgcccctgctgtgggcaggggccctggctaactgggtgaatgtaataagtgatttgaaaaaaattgaagatcttattcaatctatgcatattgatgctactttatatacggaaagtgatgttcaccccagttgcaaagtaacagcaatgaagtgctttctcttggagttacaagttatttcacttgagtccggagatgcaagtattcatgatacagtagaaaatctgatcatcctagcaaacaacagtttgtcttctaatgggaatgtaacagaatctggatgcaaagaatgtgaggaactggaggaaaaaaatattaaagaatttttgcagagttttgtacatattgtccaaatgttcatcaacacttctggaagcggagctactaacttcagcctgctgaagcaggctggagacgtggaggagaaccctggacctgccttgacctttgctttactggtggccctcctggtgctcagctgcaagtcaagctgctctgtgggctgtgatctgcctcaaacccacagcctgggtagcaggaggaccttgatgctcctggcacagatgaggagaatctctcttttctcctgcttgaaggacagacatgactttggatttccccaggaggagtttggcaaccagttccaaaaggctgaaaccatccctgtcctccatgagatgatccagcagatcttcaatctcttcagcacaaaggactcatctgctgcttgggatgagaccctcctagacaaattctacactgaactctaccagcagctgaatgacctggaagcctgtgtgatacagggggtgggggtgacagagactcccctgatgaaggaggactccattctggctgtgaggaaatacttccaaagaatcactctctatctgaaagagaagaaatacagcccttgtgcctgggaggttgtcagagcagaaatcatgagatctttttctttgtcaacaaacttgcaagaaagtttaagaagtaaggaaggaagcggacagtgtactaattatgctctcttgaaattggctggagatgttgagagcaaccctggacctatgtgtcaccagcagttggtcatctcttggttttccctggtttttctggcatctcccctcgtggccatatgggaactgaagaaagatgtttatgtcgtagaattggattggtatccggatgcccctggagaaatggtggtcctcacctgtgacacccctgaagaagatggtatcacctggaccttggaccagagcagtgaggtcttaggctctggcaaaaccctgaccatccaagtcaaagagtttggagatgctggccagtacacctgtcacaaaggaggcgaggttctaagccattcgctcctgctgcttcacaaaaaggaagatggaatttggtccactgatattttaaaggaccagaaagaacccaaaaataagacctttctaagatgcgaggccaagaattattctggacgtttcacctgctggtggctgacgacaatcagtactgatttgacattcagtgtcaaaagcagcagaggctcttctgacccccaaggggtgacgtgcggagctgctacactctctgcagagagagtcagaggggacaacaaggagtatgagtactcagtggagtgccaggaggacagtgcctgcccagctgctgaggagagtctgcccattgaggtcatggtggatgccgttcacaagctcaagtatgaaaactacaccagcagcttcttcatcagggacatcatcaaacctgacccacccaagaacttgcagctgaagccattaaagaattctcggcaggtggaggtcagctgggagtaccctgacacctggagtactccacattcctacttctccctgacattctgcgttcaggtccagggcaagagcaagagagaaaagaaagatagagtcttcacggacaagacctcagccacggtcatctgccgcaaaaatgccagcattagcgtgcgggcccaggaccgctactatagctcatcttggagcgaatgggcatctgtgccctgcagtggagggggcggcagcgggggaggcggcagcggcggcgggggatcgagaaacctccccgtggccactccagacccaggaatgttcccatgccttcaccactcccaaaacctgctgagggccgtcagcaacatgctccagaaggccagacaaactctagaattttacccttgcacttctgaagagattgatcatgaagatatcacaaaagataaaaccagcacagtggaggcctgtttaccattggaattaaccaagaatgagagttgcctaaattccagagagacctctttcataactaatgggagttgcctggcctccagaaagacctcttttatgatggccctgtgccttagtagtatttatgaagacttgaagatgtaccaggtggagttcaagaccatgaatgcaaagcttctgatggatcctaagaggcagatctttctagatcaaaacatgctggcagttattgatgagctgatgcaggccctgaatttcaacagtgagactgtgccacaaaaatcctcccttgaagaaccggatttttataaaactaaaatcaagctctgcatacttcttcatgctttcagaattcgggcagtgactattgatagagtgatgagctatctgaatgcttcctaa

SEQ ID NO: 192 - DNA, 2718 bp, Artificial Sequence
  DNA sequence for the protein coding sequence of the NG-776 transgene cassette, including the stop codon
atgtacaggatgcaactcctgtcttgcattgcactaagtcttgcacttgtcacaaacagtaactgggtgaatgtaataagtgatttgaaaaaaattgaagatcttattcaatctatgcatattgatgctactttatatacggaaagtgatgttcaccccagttgcaaagtaacagcaatgaagtgctttctcttggagttacaagttatttcacttgagtccggagatgcaagtattcatgatacagtagaaaatctgatcatcctagcaaacaacagtttgtcttctaatgggaatgtaacagaatctggatgcaaagaatgtgaggaactggaggaaaaaaatattaaagaatttttgcagagttttgtacatattgtccaaatgttcatcaacacttctggaagcggagagggcagaggaagtctgctaacatgcggtgacgtcgaggagaatcctggacctgccttgacctttgctttactggtggccctcctggtgctcagctgcaagtcaagctgctctgtgggctgtgatctgcctcaaacccacagcctgggtagcaggaggaccttgatgctcctggcacagatgaggagaatctctcttttctcctgcttgaaggacagacatgactttggatttccccaggaggagtttggcaaccagttccaaaaggctgaaaccatccctgtcctccatgagatgatccagcagatcttcaatctcttcagcacaaaggactcatctgctgcttgggatgagaccctcctagacaaattctacactgaactctaccagcagctgaatgacctggaagcctgtgtgatacagggggtgggggtgacagagactcccctgatgaaggaggactccattctggctgtgaggaaatacttccaaagaatcactctctatctgaaagagaagaaatacagcccttgtgcctgggaggttgtcagagcagaaatcatgagatctttttctttgtcaacaaacttgcaagaaagtttaagaagtaaggaaggaagcggacagtgtactaattatgctctcttgaaattggctggagatgttgagagcaaccctggacctatgtgtcaccagcagttggtcatctcttggttttccctggtttttctggcatctcccctcgtggccatatgggaactgaagaaagatgtttatgtcgtagaattggattggtatccggatgcccctggagaaatggtggtcctcacctgtgacacccctgaagaagatggtatcacctggaccttggaccagagcagtgaggtcttaggctctggcaaaaccctgaccatccaagtcaaagagtttggagatgctggccagtacacctgtcacaaaggaggcgaggttctaagccattcgctcctgctgcttcacaaaaaggaagatggaatttggtccactgatattttaaaggaccagaaagaacccaaaaataagacctttctaagatgcgaggccaagaattattctggacgtttcacctgctggtggctgacgacaatcagtactgatttgacattcagtgtcaaaagcagcagaggctcttctgacccccaaggggtgacgtgcggagctgctacactctctgcagagagagtcagaggggacaacaaggagtatgagtactcagtggagtgccaggaggacagtgcctgcccagctgctgaggagagtctgcccattgaggtcatggtggatgccgttcacaagctcaagtatgaaaactacaccagcagcttcttcatcagggacatcatcaaacctgacccacccaagaacttgcagctgaagccattaaagaattctcggcaggtggaggtcagctgggagtaccctgacacctggagtactccacattcctacttctccctgacattctgcgttcaggtccagggcaagagcaagagagaaaagaaagatagagtcttcacggacaagacctcagccacggtcatctgccgcaaaaatgccagcattagcgtgcgggcccaggaccgctactatagctcatcttggagcgaatgggcatctgtgccctgcagtggagggggcggcagcgggggaggcggcagcggcggcgggggatcgagaaacctccccgtggccactccagacccaggaatgttcccatgccttcaccactcccaaaacctgctgagggccgtcagcaacatgctccagaaggccagacaaactctagaattttacccttgcacttctgaagagattgatcatgaagatatcacaaaagataaaaccagcacagtggaggcctgtttaccattggaattaaccaagaatgagagttgcctaaattccagagagacctctttcataactaatgggagttgcctggcctccagaaagacctcttttatgatggccctgtgccttagtagtatttatgaagacttgaagatgtaccaggtggagttcaagaccatgaatgcaaagcttctgatggatcctaagaggcagatctttctagatcaaaacatgctggcagttattgatgagctgatgcaggccctgaatttcaacagtgagactgtgccacaaaaatcctcccttgaagaaccggatttttataaaactaaaatcaagctctgcatacttcttcatgctttcagaattcgggcagtgactattgatagagtgatgagctatctgaatgcttcctaa

SEQ ID NO: 193 - DNA, 2721 bp, Artificial Sequence
  DNA sequence for the protein coding sequence of the NG-777 transgene cassette, including the stop codon
atgtacaggatgcaactcctgtcttgcattgcactaagtcttgcacttgtcacaaacagtaactgggtgaatgtaataagtgatttgaaaaaaattgaagatcttattcaatctatgcatattgatgctactttatatacggaaagtgatgttcaccccagttgcaaagtaacagcaatgaagtgctttctcttggagttacaagttatttcacttgagtccggagatgcaagtattcatgatacagtagaaaatctgatcatcctagcaaacaacagtttgtcttctaatgggaatgtaacagaatctggatgcaaagaatgtgaggaactggaggaaaaaaatattaaagaatttttgcagagttttgtacatattgtccaaatgttcatcaacacttctggaagcggagctactaacttcagcctgctgaagcaggctggagacgtggaggagaaccctggacctgccttgacctttgctttactggtggccctcctggtgctcagctgcaagtcaagctgctctgtgggctgtgatctgcctcaaacccacagcctgggtagcaggaggaccttgatgctcctggcacagatgaggagaatctctcttttctcctgcttgaaggacagacatgactttggatttccccaggaggagtttggcaaccagttccaaaaggctgaaaccatccctgtcctccatgagatgatccagcagatcttcaatctcttcagcacaaaggactcatctgctgcttgggatgagaccctcctagacaaattctacactgaactctaccagcagctgaatgacctggaagcctgtgtgatacagggggtgggggtgacagagactcccctgatgaaggaggactccattctggctgtgaggaaatacttccaaagaatcactctctatctgaaagagaagaaatacagcccttgtgcctgggaggttgtcagagcagaaatcatgagatctttttctttgtcaacaaacttgcaagaaagtttaagaagtaaggaaggaagcggacagtgtactaattatgctctcttgaaattggctggagatgttgagagcaaccctggacctatgtgtcaccagcagttggtcatctcttggttttccctggtttttctggcatctcccctcgtggccatatgggaactgaagaaagatgtttatgtcgtagaattggattggtatccggatgcccctggagaaatggtggtcctcacctgtgacacccctgaagaagatggtatcacctggaccttggaccagagcagtgaggtcttaggctctggcaaaaccctgaccatccaagtcaaagagtttggagatgctggccagtacacctgtcacaaaggaggcgaggttctaagccattcgctcctgctgcttcacaaaaaggaagatggaatttggtccactgatattttaaaggaccagaaagaacccaaaaataagacctttctaagatgcgaggccaagaattattctggacgtttcacctgctggtggctgacgacaatcagtactgatttgacattcagtgtcaaaagcagcagaggctcttctgacccccaaggggtgacgtgcggagctgctacactctctgcagagagagtcagaggggacaacaaggagtatgagtactcagtggagtgccaggaggacagtgcctgcccagctgctgaggagagtctgcccattgaggtcatggtggatgccgttcacaagctcaagtatgaaaactacaccagcagcttcttcatcagggacatcatcaaacctgacccacccaagaacttgcagctgaagccattaaagaattctcggcaggtggaggtcagctgggagtaccctgacacctggagtactccacattcctacttctccctgacattctgcgttcaggtccagggcaagagcaagagagaaaagaaagatagagtcttcacggacaagacctcagccacggtcatctgccgcaaaaatgccagcattagcgtgcgggcccaggaccgctactatagctcatcttggagcgaatgggcatctgtgccctgcagtggagggggcggcagcgggggaggcggcagcggcggcgggggatcgagaaacctccccgtggccactccagacccaggaatgttcccatgccttcaccactcccaaaacctgctgagggccgtcagcaacatgctccagaaggccagacaaactctagaattttacccttgcacttctgaagagattgatcatgaagatatcacaaaagataaaaccagcacagtggaggcctgtttaccattggaattaaccaagaatgagagttgcctaaattccagagagacctctttcataactaatgggagttgcctggcctccagaaagacctcttttatgatggccctgtgccttagtagtatttatgaagacttgaagatgtaccaggtggagttcaagaccatgaatgcaaagcttctgatggatcctaagaggcagatctttctagatcaaaacatgctggcagttattgatgagctgatgcaggccctgaatttcaacagtgagactgtgccacaaaaatcctcccttgaagaaccggatttttataaaactaaaatcaagctctgcatacttcttcatgctttcagaattcgggcagtgactattgatagagtgatgagctatctgaatgcttcctaa

SEQ ID NO: 194 - DNA, 3180 bp, Artificial Sequence
  DNA sequence for the protein coding sequence of the NG-781 transgene cassette, including the stop codon
atgccactcctcctgctcctccctctcctttgggccggcgctctcgccaattgggtcaacgtgatcagcgacctcaagaaaatcgaggacctcatccagtccatgcacatcgacgccacactgtacaccgagagcgacgtgcatcctagctgtaaggtcaccgctatgaaatgtttcctgctcgaacttcaggtcatctccctggaaagcggcgacgccagcatccacgacaccgtggagaacctcattatcctggccaataatagcctttccagcaacggcaacgtcaccgagtccggctgtaaggagtgcgaagagctcgaagagaagaacatcaaggagttcctgcaaagcttcgtccacatcgtgcagatgtttattaatacctccggctccggcgaagggcggggcagcctcctgacctgtggagatgtggaagaaaaccccggcccagctttaacattcgccttgctggtcgccctgctcgtcctgtcctgtaaatccagttgttccgtgggttgcgacctcccacagacacattccctcggctctagacgcacattaatgctgctcgcccaaatgagacggatttccctgttttcatgtctgaaagataggcacgatttcggcttccctcaagaagaattcggaaatcaatttcagaaagccgagacaattcccgtgcttcacgaaatgattcaacaaatttttaacctgttctccaccaaagatagctccgccgcctgggacgaaacactgctcgataagttttataccgagctttatcaacagctcaacgatctcgaggcttgcgtcattcaaggcgtcggcgttaccgaaaccccactcatgaaagaagattctatcctcgccgtccggaagtattttcagcgcattaccctgtacctcaaggaaaaaaagtattccccctgcgcttgggaagtcgttcgcgctgagattatgaggtccttctcactctctaccaatctccaggagagccttcggtccaaagagggcagtggccaatgcaccaactacgccctgcttaagctggccggcgacgtcgaaagtaatcccggcccagcccaatctctcgcacttagtctgctcattctcgtgcttgctttcgggattccaagaactcagggaagcgacggcggtgcccaagattgctgtctgaaatatagtcagagaaaaatccctgctaaagtggttcggagttatcgcaaacaagagcccagtttggggtgttcaattcccgcaattctctttttaccacggaaacggtcccaagctgaactgtgcgctgatcctaaagaactgtgggtccaacagctcatgcaacaccttgataaaaccccttctccccaaaagcctgctcaagggtgtagaaaagatagaggagcttctaaaaccggtaaaaagggcaaagggtctaagggatgtaaaagaaccgaacgctcccaaactcccaagggccccggcagtggcgtcaagcaaacccttaacttcgatctgctgaaactggccggcgatgtcgaatctaatcccggccccatgtgccatcaacaacttgtgatttcctggttcagcctcgtgttcctcgcctcccctctggtcgctatctgggagctcaaaaaggacgtctacgtggtcgagcttgactggtaccccgacgctccaggcgagatggtcgtgctgacatgcgatacacccgaggaggacggcattacatggacactggatcaatccagcgaagtgctgggatccggaaagacactcacaattcaggtgaaggaattcggcgacgccggacaatatacatgccataagggcggagaagtgctgtcccactccctgctcctcttacataagaaagaggacggcatctggtctaccgacatcctcaaagatcaaaaggagccaaagaacaaaacattcctgcgctgtgaagctaaaaactactccggcagatttacatgttggtggctcaccaccattagcaccgacctcacctttagcgtgaagagttcccggggatccagcgatcctcagggcgtcacctgtggcgccgcaaccctgtccgccgaacgggtgcggggcgataataaagaatacgaatattccgtcgaatgtcaagaagatagcgcttgtcccgccgcagaagaaagcctccctatcgaagtgatggtcgacgctgtgcataaactgaaatacgagaattatacaagttcctttttcattcgggatattatcaagcccgatcccccaaaaaatctccaactcaaacccctcaaaaactccagacaagtcgaagtgtcctgggaatatcccgatacatggagcaccccccactcttattttagcctcaccttttgtgtgcaagtgcaaggaaaatccaaacgcgagaaaaaggaccgcgtgtttaccgataaaacatccgctaccgtgatttgtcggaagaacgcttccatcagtgtccgcgctcaagatcggtattactcctcctcctggagtgagtgggcctccgtcccatgtagcggcggaggtgggagtggcggcgggggttccggagggggtggctcccgcaatctgcctgtcgctacccccgatcccggcatgtttccctgtctgcatcatagccagaatctcctcagagctgtgagtaatatgctgcaaaaagctcgccagaccctggagttctatccctgtacctccgaggaaatcgaccacgaggacattaccaaggacaagacatctaccgtcgaagcttgcctgccccttgagctgacaaaaaacgaaagctgtctgaactctcgcgaaacatcctttatcaccaacggaagctgtctcgcttctcggaaaacatccttcatgatggctctctgtctgagcagcatctacgaggatcttaaaatgtatcaagtcgaatttaagacaatgaacgccaaactcctgatggacccaaaacggcaaattttcctggaccagaatatgctcgccgtgatcgacgaactcatgcaagctctcaactttaatagcgaaaccgtcccccagaagtcttctctcgaggagcccgacttctacaagaccaagattaaactgtgtatcctgctccacgcctttcggatccgcgccgtcaccatcgacagggtcatgtcctacctgaacgcctcttaa

SEQ ID NO: 195 - DNA, 3153 bp, Artificial Sequence
  DNA sequence for the protein coding sequence of the NG-782 transgene cassette, including the stop codon
atgccactcctcctgctcctccctctcctttgggccggcgctctcgccaattgggtcaacgtgatcagcgacctcaagaaaatcgaggacctcatccagtccatgcacatcgacgccacactgtacaccgagagcgacgtgcatcctagctgtaaggtcaccgctatgaaatgtttcctgctcgaacttcaggtcatctccctggaaagcggcgacgccagcatccacgacaccgtggagaacctcattatcctggccaataatagcctttccagcaacggcaacgtcaccgagtccggctgtaaggagtgcgaagagctcgaagagaagaacatcaaggagttcctgcaaagcttcgtccacatcgtgcagatgtttattaatacctccggctccggcgaagggcggggcagcctcctgacctgtggagatgtggaagaaaaccccggcccagctttaacattcgccttgctggtcgccctgctcgtcctgtcctgtaaatccagttgttccgtgggttgcgacctcccacagacacattccctcggctctagacgcacattaatgctgctcgcccaaatgagacggatttccctgttttcatgtctgaaagataggcacgatttcggcttccctcaagaagaattcggaaatcaatttcagaaagccgagacaattcccgtgcttcacgaaatgattcaacaaatttttaacctgttctccaccaaagatagctccgccgcctgggacgaaacactgctcgataagttttataccgagctttatcaacagctcaacgatctcgaggcttgcgtcattcaaggcgtcggcgttaccgaaaccccactcatgaaagaagattctatcctcgccgtccggaagtattttcagcgcattaccctgtacctcaaggaaaaaaagtattccccctgcgcttgggaagtcgttcgcgctgagattatgaggtccttctcactctctaccaatctccaggagagccttcggtccaaagagggcagtggccaatgcaccaactacgccctgcttaagctggccggcgacgtcgaaagtaatcccggcccaaaaaagagcggcgtgctctttctgctcggaattatcctcctggtgctcatcggcgtccagggcacacccgtcgtccggaaaggcagatgcagctgtatttccactaatcagggcaccattcatctgcagagcttaaaggatctgaagcagttcgctccctccccctcttgtgaaaagatcgagattatcgccaccctcaaaaacggcgtgcagacctgcctgaatcctgacagcgccgacgtcaaagagctcatcaagaaatgggaaaagcaagtgtcccagaaaaagaaacagaaaaacggaaagaagcaccagaagaaaaaggtcctcaaggtccggaagtcccagcggtccagacagaagaaaaccaccggcagtggcgtcaagcaaacccttaacttcgatctgctgaaactggccggcgatgtcgaatctaatcccggccccatgtgccatcaacaacttgtgatttcctggttcagcctcgtgttcctcgcctcccctctggtcgctatctgggagctcaaaaaggacgtctacgtggtcgagcttgactggtaccccgacgctccaggcgagatggtcgtgctgacatgcgatacacccgaggaggacggcattacatggacactggatcaatccagcgaagtgctgggatccggaaagacactcacaattcaggtgaaggaattcggcgacgccggacaatatacatgccataagggcggagaagtgctgtcccactccctgctcctcttacataagaaagaggacggcatctggtctaccgacatcctcaaagatcaaaaggagccaaagaacaaaacattcctgcgctgtgaagctaaaaactactccggcagatttacatgttggtggctcaccaccattagcaccgacctcacctttagcgtgaagagttcccggggatccagcgatcctcagggcgtcacctgtggcgccgcaaccctgtccgccgaacgggtgcggggcgataataaagaatacgaatattccgtcgaatgtcaagaagatagcgcttgtcccgccgcagaagaaagcctccctatcgaagtgatggtcgacgctgtgcataaactgaaatacgagaattatacaagttcctttttcattcgggatattatcaagcccgatcccccaaaaaatctccaactcaaacccctcaaaaactccagacaagtcgaagtgtcctgggaatatcccgatacatggagcaccccccactcttattttagcctcaccttttgtgtgcaagtgcaaggaaaatccaaacgcgagaaaaaggaccgcgtgtttaccgataaaacatccgctaccgtgatttgtcggaagaacgcttccatcagtgtccgcgctcaagatcggtattactcctcctcctggagtgagtgggcctccgtcccatgtagcggcggaggtgggagtggcggcgggggttccggagggggtggctcccgcaatctgcctgtcgctacccccgatcccggcatgtttccctgtctgcatcatagccagaatctcctcagagctgtgagtaatatgctgcaaaaagctcgccagaccctggagttctatccctgtacctccgaggaaatcgaccacgaggacattaccaaggacaagacatctaccgtcgaagcttgcctgccccttgagctgacaaaaaacgaaagctgtctgaactctcgcgaaacatcctttatcaccaacggaagctgtctcgcttctcggaaaacatccttcatgatggctctctgtctgagcagcatctacgaggatcttaaaatgtatcaagtcgaatttaagacaatgaacgccaaactcctgatggacccaaaacggcaaattttcctggaccagaatatgctcgccgtgatcgacgaactcatgcaagctctcaactttaatagcgaaaccgtcccccagaagtcttctctcgaggagcccgacttctacaagaccaagattaaactgtgtatcctgctccacgcctttcggatccgcgccgtcaccatcgacagggtcatgtcctacctgaacgcctcttaa

SEQ ID NO: 196 - DNA, 3153 bp, Artificial Sequence
  DNA sequence for the protein coding sequence of the NG-784 transgene cassette, including the stop codon
atgaaaaagagcggcgtgctctttctgctcggaattatcctcctggtgctcatcggcgtccagggcacacccgtcgtccggaaaggcagatgcagctgtatttccactaatcagggcaccattcatctgcagagcttaaaggatctgaagcagttcgctccctccccctcttgtgaaaagatcgagattatcgccaccctcaaaaacggcgtgcagacctgcctgaatcctgacagcgccgacgtcaaagagctcatcaagaaatgggaaaagcaagtgtcccagaaaaagaaacagaaaaacggaaagaagcaccagaagaaaaaggtcctcaaggtccggaagtcccagcggtccagacagaagaaaaccaccggcagtggcgtcaagcaaacccttaacttcgatctgctgaaactggccggcgatgtcgaatctaatcccggccccgctttaacattcgccttgctggtcgccctgctcgtcctgtcctgtaaatccagttgttccgtgggttgcgacctcccacagacacattccctcggctctagacgcacattaatgctgctcgcccaaatgagacggatttccctgttttcatgtctgaaagataggcacgatttcggcttccctcaagaagaattcggaaatcaatttcagaaagccgagacaattcccgtgcttcacgaaatgattcaacaaatttttaacctgttctccaccaaagatagctccgccgcctgggacgaaacactgctcgataagttttataccgagctttatcaacagctcaacgatctcgaggcttgcgtcattcaaggcgtcggcgttaccgaaaccccactcatgaaagaagattctatcctcgccgtccggaagtattttcagcgcattaccctgtacctcaaggaaaaaaagtattccccctgcgcttgggaagtcgttcgcgctgagattatgaggtccttctcactctctaccaatctccaggagagccttcggtccaaagagggcagtggccaatgcaccaactacgccctgcttaagctggccggcgacgtcgaaagtaatcccggcccaccactcctcctgctcctccctctcctttgggccggcgctctcgccaattgggtcaacgtgatcagcgacctcaagaaaatcgaggacctcatccagtccatgcacatcgacgccacactgtacaccgagagcgacgtgcatcctagctgtaaggtcaccgctatgaaatgtttcctgctcgaacttcaggtcatctccctggaaagcggcgacgccagcatccacgacaccgtggagaacctcattatcctggccaataatagcctttccagcaacggcaacgtcaccgagtccggctgtaaggagtgcgaagagctcgaagagaagaacatcaaggagttcctgcaaagcttcgtccacatcgtgcagatgtttattaatacctccggctccggcgaagggcggggcagcctcctgacctgtggagatgtggaagaaaaccccggcccaatgtgccatcaacaacttgtgatttcctggttcagcctcgtgttcctcgcctcccctctggtcgctatctgggagctcaaaaaggacgtctacgtggtcgagcttgactggtaccccgacgctccaggcgagatggtcgtgctgacatgcgatacacccgaggaggacggcattacatggacactggatcaatccagcgaagtgctgggatccggaaagacactcacaattcaggtgaaggaattcggcgacgccggacaatatacatgccataagggcggagaagtgctgtcccactccctgctcctcttacataagaaagaggacggcatctggtctaccgacatcctcaaagatcaaaaggagccaaagaacaaaacattcctgcgctgtgaagctaaaaactactccggcagatttacatgttggtggctcaccaccattagcaccgacctcacctttagcgtgaagagttcccggggatccagcgatcctcagggcgtcacctgtggcgccgcaaccctgtccgccgaacgggtgcggggcgataataaagaatacgaatattccgtcgaatgtcaagaagatagcgcttgtcccgccgcagaagaaagcctccctatcgaagtgatggtcgacgctgtgcataaactgaaatacgagaattatacaagttcctttttcattcgggatattatcaagcccgatcccccaaaaaatctccaactcaaacccctcaaaaactccagacaagtcgaagtgtcctgggaatatcccgatacatggagcaccccccactcttattttagcctcaccttttgtgtgcaagtgcaaggaaaatccaaacgcgagaaaaaggaccgcgtgtttaccgataaaacatccgctaccgtgatttgtcggaagaacgcttccatcagtgtccgcgctcaagatcggtattactcctcctcctggagtgagtgggcctccgtcccatgtagcggcggaggtgggagtggcggcgggggttccggagggggtggctcccgcaatctgcctgtcgctacccccgatcccggcatgtttccctgtctgcatcatagccagaatctcctcagagctgtgagtaatatgctgcaaaaagctcgccagaccctggagttctatccctgtacctccgaggaaatcgaccacgaggacattaccaaggacaagacatctaccgtcgaagcttgcctgccccttgagctgacaaaaaacgaaagctgtctgaactctcgcgaaacatcctttatcaccaacggaagctgtctcgcttctcggaaaacatccttcatgatggctctctgtctgagcagcatctacgaggatcttaaaatgtatcaagtcgaatttaagacaatgaacgccaaactcctgatggacccaaaacggcaaattttcctggaccagaatatgctcgccgtgatcgacgaactcatgcaagctctcaactttaatagcgaaaccgtcccccagaagtcttctctcgaggagcccgacttctacaagaccaagattaaactgtgtatcctgctccacgcctttcggatccgcgccgtcaccatcgacagggtcatgtcctacctgaacgcctcttaa

SEQ ID NO: 197 - DNA, 2610 bp, Artificial Sequence
  DNA sequence for the protein coding sequence of the NG-785 transgene cassette, including the stop codon
atgtgtcaccagcagttggtcatctcttggttttccctggtttttctggcatctcccctcgtggccatatgggaactgaagaaagatgtttatgtcgtagaattggattggtatccggatgcccctggagaaatggtggtcctcacctgtgacacccctgaagaagatggtatcacctggaccttggaccagagcagtgaggtcttaggctctggcaaaaccctgaccatccaagtcaaagagtttggagatgctggccagtacacctgtcacaaaggaggcgaggttctaagccattcgctcctgctgcttcacaaaaaggaagatggaatttggtccactgatattttaaaggaccagaaagaacccaaaaataagacctttctaagatgcgaggccaagaattattctggacgtttcacctgctggtggctgacgacaatcagtactgatttgacattcagtgtcaaaagcagcagaggctcttctgacccccaaggggtgacgtgcggagctgctacactctctgcagagagagtcagaggggacaacaaggagtatgagtactcagtggagtgccaggaggacagtgcctgcccagctgctgaggagagtctgcccattgaggtcatggtggatgccgttcacaagctcaagtatgaaaactacaccagcagcttcttcatcagggacatcatcaaacctgacccacccaagaacttgcagctgaagccattaaagaattctcggcaggtggaggtcagctgggagtaccctgacacctggagtactccacattcctacttctccctgacattctgcgttcaggtccagggcaagagcaagagagaaaagaaagatagagtcttcacggacaagacctcagccacggtcatctgccgcaaaaatgccagcattagcgtgcgggcccaggaccgctactatagctcatcttggagcgaatgggcatctgtgccctgcagtggagggggcggcagcgggggaggcggcagcggcggcgggggatcgagaaacctccccgtggccactccagacccaggaatgttcccatgccttcaccactcccaaaacctgctgagggccgtcagcaacatgctccagaaggccagacaaactctagaattttacccttgcacttctgaagagattgatcatgaagatatcacaaaagataaaaccagcacagtggaggcctgtttaccattggaattaaccaagaatgagagttgcctaaattccagagagacctctttcataactaatgggagttgcctggcctccagaaagacctcttttatgatggccctgtgccttagtagtatttatgaagacttgaagatgtaccaggtggagttcaagaccatgaatgcaaagcttctgatggatcctaagaggcagatctttctagatcaaaacatgctggcagttattgatgagctgatgcaggccctgaatttcaacagtgagactgtgccacaaaaatcctcccttgaagaaccggatttttataaaactaaaatcaagctctgcatacttcttcatgctttcagaattcgggcagtgactattgatagagtgatgagctatctgaatgcttccggaagcggagagggcagaggaagtctgctaacatgcggtgacgtcgaggagaatcctggacctgccccgcggcgggcgcgcggctgccggaccctcggtctcccggcgctgctactgctgctgctgctccggccgccggcgacgcggggcatcacgtgccctccccccatgtccgtggaacacgcagacatctgggtcaagagctacagcttgtactccagggagcggtacatttgtaactctggtttcaagcgtaaagccggcacgtccagcctgacggagtgcgtgttgaacaaggccacgaatgtcgcccactggacaacccccagtctcaaatgcattagagacgaacaaaaactcatctcagaagaggatctggctgtgggccaggacacgcaggaggtcatcgtggtgccacactccttgccctttaaggtggtggtgatctcagccatcctggccctggtggtgctcaccatcatctcccttatcatcctcatcatgctttggcagaagaagccacgtggaagcggagctactaacttcagcctgctgaagcaggctggagacgtggaggagaaccctggacctgactggacctggcgcatcctgttcttggtggcagctgctacgggagctcattccaactgggtgaatgtaataagtgatttgaaaaaaattgaagatcttattcaatctatgcatattgatgctactttatatacggaaagtgatgttcaccccagttgcaaagtaacagcaatgaagtgctttctcttggagttacaagttatttcacttgagtccggagatgcaagtattcatgatacagtagaaaatctgatcatcctagcaaacaacagtttgtcttctaatgggaatgtaacagaatctggatgcaaagaatgtgaggaactggaggaaaaaaatattaaagaatttttgcagagttttgtacatattgtccaaatgttcatcaacacttcttaa

SEQ ID NO: 198 - DNA, 2610 bp, Artificial Sequence
  DNA sequence for the protein coding sequence of the NG-785A transgene cassette, including the stop codon
atgtgccaccagcagctggtcattagctggtttagcctcgtgttcctcgctagccctctggtggctatctgggagctcaagaaggatgtgtacgtcgtcgagctggattggtatcccgacgctcccggagaaatggtggtgctgacatgtgatacccccgaggaagacggcattacatggaccctcgatcagtcctccgaggtgctcggcagcggaaagaccctcaccattcaagtgaaggagtttggcgacgctggccagtatacatgccacaagggcggcgaagtgctgagccactctctgctgctgctgcacaagaaggaggatggcatctggagcacagacattctgaaggaccagaaagagcccaagaacaagacctttctgaggtgcgaggccaagaactacagcggaagattcacatgctggtggctgaccaccattagcaccgacctcaccttttccgtcaaaagctctagaggcagctccgatcctcaaggagtcacatgcggcgccgctacactgagcgccgaaagagtgaggggcgataacaaggagtacgaatactccgtggaatgccaagaggactccgcttgccccgccgccgaagaatctctgcccatcgaggtgatggtggatgccgtccataagctgaaatacgagaactacacaagcagcttcttcattagagatattatcaagcccgatccccccaagaatctgcagctcaagcctctgaagaattctagacaagtggaagtcagctgggaataccccgacacatggagcacaccccacagctacttctctctgaccttctgcgtgcaagtccaaggcaagtccaagagagagaagaaggatagagtcttcaccgacaaaacaagcgccacagtcatctgtagaaaaaatgccagcatcagcgtgagggcccaagacagatattattcctccagctggtccgaatgggcctccgtgccttgcagcggaggaggaggatccggaggaggcggatccggcggaggaggcagcagaaacctccccgtggccacccccgatcccggcatgtttccttgcctccaccactcccagaatctgctgagggccgtgagcaatatgctgcagaaggctaggcagacactggagttttacccttgcaccagcgaggagatcgaccacgaagacatcacaaaggacaagaccagcaccgtggaggcttgtctgcctctcgagctcaccaaaaatgaaagctgcctcaattccagagagaccagcttcatcaccaatggaagctgtctggcttctagaaagacaagcttcatgatggctctgtgcctcagcagcatctacgaggatctgaaaatgtatcaagtggagttcaagaccatgaacgccaagctgctcatggatcccaagagacagatcttcctcgaccaaaacatgctcgccgtgatcgatgagctgatgcaagctctgaactttaactccgagaccgtcccccaaaagagcagcctcgaggaacccgacttctacaagaccaagattaagctgtgcattctgctgcacgcctttaggattagagctgtgaccatcgatagggtcatgagctacctcaacgctagcggctccggagaaggaagaggctccctcctcacatgcggcgacgtcgaggagaaccccggccccgcccctagaagggccagaggatgtaggacactcggactccccgctctgctgctgctgctgctgctgagaccccccgctacaagaggcattacatgccccccccctatgtccgtcgagcatgccgatatctgggtcaagagctactccctctactccagagagaggtacatttgcaatagcggcttcaaaagaaaagctggcaccagctctctgaccgagtgcgtgctcaataaggccaccaacgtggcccactggaccaccccttccctcaaatgcattagagacgagcagaagctgatcagcgaagaggacctcgctgtgggccaagacacccaagaggtcatcgtcgtgccccattctctgcccttcaaggtcgtggtcatttccgccattctggctctggtggtcctcaccatcatttctctgatcattctgatcatgctgtggcagaaaaagcccagaggcagcggcgctaccaatttttctctgctgaagcaagccggcgacgtggaggagaatcccggccccgactggacatggaggatcctctttctcgtggctgccgctaccggcgcccacagcaactgggtcaacgtcattagcgatctcaaaaagatcgaggatctgatccagagcatgcacatcgatgctacactgtacaccgaatccgacgtgcatcccagctgcaaagtcaccgccatgaagtgctttctgctggaactccaagtgatttccctcgagtccggagacgctagcattcacgacaccgtcgaaaatctgattattctggccaacaactctctgtcctccaacggaaatgtgaccgagagcggctgcaaagagtgcgaggaactcgaggagaagaacattaaggagtttctgcagtccttcgtgcacatcgtgcagatgttcattaacacctcctaa

SEQ ID NO: 199 - DNA, 2433 bp, Artificial Sequence
  DNA sequence for the protein coding sequence of the NG-786A transgene cassette, including the stop codon
atgtgccaccagcagctggtcattagctggtttagcctcgtgttcctcgctagccctctggtggctatctgggagctcaagaaggatgtgtacgtcgtcgagctggattggtatcccgacgctcccggagaaatggtggtgctgacatgtgatacccccgaggaagacggcattacatggaccctcgatcagtcctccgaggtgctcggcagcggaaagaccctcaccattcaagtgaaggagtttggcgacgctggccagtatacatgccacaagggcggcgaagtgctgagccactctctgctgctgctgcacaagaaggaggatggcatctggagcacagacattctgaaggaccagaaagagcccaagaacaagacctttctgaggtgcgaggccaagaactacagcggaagattcacatgctggtggctgaccaccattagcaccgacctcaccttttccgtcaaaagctctagaggcagctccgatcctcaaggagtcacatgcggcgccgctacactgagcgccgaaagagtgaggggcgataacaaggagtacgaatactccgtggaatgccaagaggactccgcttgccccgccgccgaagaatctctgcccatcgaggtgatggtggatgccgtccataagctgaaatacgagaactacacaagcagcttcttcattagagatattatcaagcccgatccccccaagaatctgcagctcaagcctctgaagaattctagacaagtggaagtcagctgggaataccccgacacatggagcacaccccacagctacttctctctgaccttctgcgtgcaagtccaaggcaagtccaagagagagaagaaggatagagtcttcaccgacaaaacaagcgccacagtcatctgtagaaaaaatgccagcatcagcgtgagggcccaagacagatattattcctccagctggtccgaatgggcctccgtgccttgcagcggaggaggaggatccggaggaggcggatccggcggaggaggcagcagaaacctccccgtggccacccccgatcccggcatgtttccttgcctccaccactcccagaatctgctgagggccgtgagcaatatgctgcagaaggctaggcagacactggagttttacccttgcaccagcgaggagatcgaccacgaagacatcacaaaggacaagaccagcaccgtggaggcttgtctgcctctcgagctcaccaaaaatgaaagctgcctcaattccagagagaccagcttcatcaccaatggaagctgtctggcttctagaaagacaagcttcatgatggctctgtgcctcagcagcatctacgaggatctgaaaatgtatcaagtggagttcaagaccatgaacgccaagctgctcatggatcccaagagacagatcttcctcgaccaaaacatgctcgccgtgatcgatgagctgatgcaagctctgaactttaactccgagaccgtcccccaaaagagcagcctcgaggaacccgacttctacaagaccaagattaagctgtgcattctgctgcacgcctttaggattagagctgtgaccatcgatagggtcatgagctacctcaacgctagcggctccggagaaggaagaggctccctcctcacatgcggcgacgtcgaggagaaccccggccccgcccctagaagggccagaggatgtaggacactcggactccccgctctgctgctgctgctgctgctgagaccccccgctacaagaggcattacatgccccccccctatgtccgtcgagcatgccgatatctgggtcaagagctactccctctactccagagagaggtacatttgcaatagcggcttcaaaagaaaagctggcaccagctctctgaccgagtgcgtgctcaataaggccaccaacgtggcccactggaccaccccttccctcaaatgcattagagacggcagcggcgctaccaatttttctctgctgaagcaagccggcgacgtggaggagaatcccggccccgactggacatggaggatcctctttctcgtggctgccgctaccggcgcccacagcaactgggtcaacgtcattagcgatctcaaaaagatcgaggatctgatccagagcatgcacatcgatgctacactgtacaccgaatccgacgtgcatcccagctgcaaagtcaccgccatgaagtgctttctgctggaactccaagtgatttccctcgagtccggagacgctagcattcacgacaccgtcgaaaatctgattattctggccaacaactctctgtcctccaacggaaatgtgaccgagagcggctgcaaagagtgcgaggaactcgaggagaagaacattaaggagtttctgcagtccttcgtgcacatcgtgcagatgttcattaacacctcctaa

SEQ ID NO: 200 - DNA, 2358 bp, Artificial Sequence
  DNA sequence for the protein coding sequence of the NG-787 transgene cassette, including the stop codon
atgtgtcaccagcagttggtcatctcttggttttccctggtttttctggcatctcccctcgtggccatatgggaactgaagaaagatgtttatgtcgtagaattggattggtatccggatgcccctggagaaatggtggtcctcacctgtgacacccctgaagaagatggtatcacctggaccttggaccagagcagtgaggtcttaggctctggcaaaaccctgaccatccaagtcaaagagtttggagatgctggccagtacacctgtcacaaaggaggcgaggttctaagccattcgctcctgctgcttcacaaaaaggaagatggaatttggtccactgatattttaaaggaccagaaagaacccaaaaataagacctttctaagatgcgaggccaagaattattctggacgtttcacctgctggtggctgacgacaatcagtactgatttgacattcagtgtcaaaagcagcagaggctcttctgacccccaaggggtgacgtgcggagctgctacactctctgcagagagagtcagaggggacaacaaggagtatgagtactcagtggagtgccaggaggacagtgcctgcccagctgctgaggagagtctgcccattgaggtcatggtggatgccgttcacaagctcaagtatgaaaactacaccagcagcttcttcatcagggacatcatcaaacctgacccacccaagaacttgcagctgaagccattaaagaattctcggcaggtggaggtcagctgggagtaccctgacacctggagtactccacattcctacttctccctgacattctgcgttcaggtccagggcaagagcaagagagaaaagaaagatagagtcttcacggacaagacctcagccacggtcatctgccgcaaaaatgccagcattagcgtgcgggcccaggaccgctactatagctcatcttggagcgaatgggcatctgtgccctgcagtggagggggcggcagcgggggaggcggcagcggcggcgggggatcgagaaacctccccgtggccactccagacccaggaatgttcccatgccttcaccactcccaaaacctgctgagggccgtcagcaacatgctccagaaggccagacaaactctagaattttacccttgcacttctgaagagattgatcatgaagatatcacaaaagataaaaccagcacagtggaggcctgtttaccattggaattaaccaagaatgagagttgcctaaattccagagagacctctttcataactaatgggagttgcctggcctccagaaagacctcttttatgatggccctgtgccttagtagtatttatgaagacttgaagatgtaccaggtggagttcaagaccatgaatgcaaagcttctgatggatcctaagaggcagatctttctagatcaaaacatgctggcagttattgatgagctgatgcaggccctgaatttcaacagtgagactgtgccacaaaaatcctcccttgaagaaccggatttttataaaactaaaatcaagctctgcatacttcttcatgctttcagaattcgggcagtgactattgatagagtgatgagctatctgaatgcttccggaagcggagagggcagaggaagtctgctaacatgcggtgacgtcgaggagaatcctggacctgactggacctggcgcatcctgttcttggtggcagctgctacgggagctcattccaactgggtgaatgtaataagtgatttgaaaaaaattgaagatcttattcaatctatgcatattgatgctactttatatacggaaagtgatgttcaccccagttgcaaagtaacagcaatgaagtgctttctcttggagttacaagttatttcacttgagtccggagatgcaagtattcatgatacagtagaaaatctgatcatcctagcaaacaacagtttgtcttctaatgggaatgtaacagaatctggatgcaaagaatgtgaggaactggaggaaaaaaatattaaagaatttttgcagagttttgtacatattgtccaaatgttcatcaacacttctagcggtggcggatccggaggcggtgggagcgggggaggcggttctgggggaggcggtagcggcggaggttccctgcagatcacgtgccctccccccatgtccgtggaacacgcagacatctgggtcaagagctacagcttgtactccagggagcggtacatttgtaactctggtttcaagcgtaaagccggcacgtccagcctgacggagtgcgtgttgaacaaggccacgaatgtcgcccactggacaacccccagtctcaaatgcattagagactaa

SEQ ID NO: 201 - DNA, 2358 bp, Artificial Sequence
  DNA sequence for the protein coding sequence of the NG-787A transgene cassette, including the stop codon
atgtgccaccagcagctggtgatcagctggttctctctggtgtttctggcttcccctctggtggccatctgggagctgaagaaagacgtctacgtggtcgaactcgactggtatcccgacgcccccggcgagatggtggtgctgacatgcgatacccccgaggaggatggcattacatggacactggaccaatcctccgaggtgctgggcagcggaaagacactgaccatccaagtgaaggagtttggagacgccggccagtatacatgccataaaggcggagaagtgctcagccattctctgctgctgctgcacaagaaggaagacggaatctggtccaccgacattctcaaggaccaaaaggaacccaagaacaagacctttctgagatgcgaggctaagaactacagcggaagatttacatgctggtggctgaccacaatcagcaccgatctcaccttcagcgtgaaaagcagcagaggaagcagcgaccctcaaggcgtgacatgcggagccgctacactgtccgctgaaagagtgaggggcgacaacaaggagtacgagtattccgtggagtgtcaagaggacagcgcttgccccgctgctgaggaaagcctccctattgaggtcatggtcgacgctgtgcacaagctgaagtatgagaactataccagcagcttttttattagagacatcatcaaacccgacccccccaagaatctgcagctgaagcctctgaagaactctagacaagtggaggtcagctgggagtatcccgacacatggtccaccccccacagctatttctctctgaccttttgcgtgcaagtccaaggcaaaagcaagagagaaaagaaggatagagtcttcaccgacaagacatccgctacagtgatctgcagaaagaacgcctccattagcgtgagggctcaagatagatactattccagcagctggagcgaatgggcctccgtcccttgttccggaggcggcggctccggcggaggcggctccggcggcggcggcagcagaaatctgcccgtggctacccccgaccccggcatgtttccttgtctgcaccacagccagaatctgctgagggctgtgtccaacatgctccagaaagctaggcagacactggaattctacccttgcaccagcgaggaaatcgaccacgaggacattaccaaggacaagaccagcaccgtggaggcttgtctgcctctggagctgaccaagaatgagagctgcctcaactccagagaaacatccttcatcaccaacggcagctgtctggcttctagaaagacaagcttcatgatggctctgtgcctctccagcatctacgaggacctcaagatgtaccaagtggagtttaaaaccatgaacgccaagctgctgatggatcccaaaaggcagatcttcctcgaccagaacatgctggccgtgatcgacgaactcatgcaagccctcaacttcaactccgagaccgtcccccagaagtcctctctggaggagcccgatttctacaagaccaaaatcaagctctgcattctgctccacgccttcagaattagagccgtgaccattgatagagtgatgagctacctcaacgcttccggaagcggcgagggaagaggatctctgctcacatgtggagacgtggaggaaaaccccggccccgactggacatggaggattctgtttctggtggccgctgctaccggcgctcacagcaattgggtcaacgtcatcagcgacctcaagaagatcgaggacctcatccagtccatgcacatcgacgctacactgtacaccgagtccgatgtgcaccccagctgcaaagtgaccgctatgaagtgcttcctcctcgagctgcaagtgatttccctcgagtccggcgatgcctccatccacgacacagtggagaacctcatcattctggccaacaactctctgtcctccaacggaaacgtgacagagtccggctgcaaggaatgtgaggagctggaggaaaagaatatcaaggaatttctgcagagcttcgtgcacatcgtgcagatgttcatcaatacaagcagcggcggcggaagcggaggaggcggaagcggcggaggaggctccggaggaggaggctccggcggaggctccctccagattacatgccctcctcccatgtccgtggagcacgccgacatctgggtcaagagctactctctgtactctagagagaggtacatttgcaactccggcttcaagaggaaagccggaacatcctccctcaccgaatgcgtgctgaacaaagctaccaacgtcgcccactggaccacaccctctctgaagtgcattagagactaa

SEQ ID NO: 202 - DNA, 2898 bp, Artificial Sequence
  DNA sequence for the protein coding sequence of the NG-788P transgene cassette, including the stop codon
atgtgccatcaacagctggtcatcagctggttttcgctggtcttcctcgcgagccctctggtggccatctgggagctgaagaaggatgtgtacgtggtggagctcgactggtacccagacgctccaggagagatggtggtcctgacttgcgacaccccagaagaggacggaatcacctggaccctcgaccaatcatccgaggtgctgggaagcgggaagacgctgactatccaagtgaaggagttcggagatgccggtcagtatacttgccataagggaggagaagtgctgagccactccctgctactgctgcataagaaggaggatggaatctggagcaccgacatcctgaaggaccaaaaagaaccaaagaacaagacctttctcagatgcgaagccaagaattactcagggcgcttcacttgctggtggctgacgaccatctcgactgacctcacctttagcgtcaagtcgtcgcgggggagctccgacccgcaaggagtgacttgcggcgcggcgactctgtcagcggagagggtcagaggagacaacaaagaatacgaatactcggtggaatgccaagaggactcagcctgccctgcagcggaggagtcgctgccgatcgaggtgatggtggatgccgtgcacaaactcaagtacgaaaactacacgtcgtcattcttcatccgggatatcatcaaacctgacccccctaagaacctgcaactaaagcctctgaaaaattcgcgccaggtggaagtgtcgtgggaataccctgacacttggtcgacgccccatagctatttctcactcactttctgcgtccaggtccagggtaaaagcaagcgggaaaaaaaggatcgcgtcttcacggataaaaccagcgcaaccgtcatctgccgcaagaacgcgtccatctcagtcagggcacaagaccgctactattcatcaagctggtccgaatgggcgtcggtgccctgctcaggcggcggaggctcaggaggaggtggaagcggaggcggaggatcgcgcaatctgccggtggcaacccctgaccccggcatgttcccgtgccttcaccattcccaaaacctgctgagagctgtgtcgaacatgctccagaaggctcgccaaactctggagttctatccgtgcacttcggaggaaatcgaccacgaagacatcactaaagacaaaaccagcaccgtggaagcatgcctgccgttggagctaaccaagaacgaatcatgcctgaactcccgcgagaccagctttatcacgaatggctcgtgcctggcaagccgcaaaacttcattcatgatggccctgtgcctgtcgtcgatctacgaggatctgaaaatgtaccaggtcgagttcaagacgatgaacgcgaaactgctaatggacccaaagcggcaaattttcctggatcaaaacatgctggcggtcatcgacgagttgatgcaggctctcaacttcaacagcgaaacggtgccacaaaagagcagcctggaggaaccagatttctacaagacgaaaattaagttgtgcatcctcctgcacgcgttcaggattcgcgctgtgactatcgaccgggtcatgtcgtacctgaacgccagcggcagcggggagggccgcgggagcctgctgacctgcggggatgtcgaggagaatccgggacctgcacagtccctagctctgtcacttctgattctggtgctggcattcggtatccctcgcacgcaaggctcggacggtggggctcaggactgctgtctaaagtacagccagagaaagatccctgccaaggtggtgcgcagctacagaaagcaggagccttcactgggctgctcgatccccgccatcctgtttctgccaagaaaaagaagccaagccgagctgtgcgccgatccgaaggaactgtgggtgcagcagctgatgcagcacctggataagaccccgtcaccccaaaagccggcacagggatgccggaaggatcggggagcctcgaagaccggaaagaagggaaagggaagcaagggttgcaagagaactgagcgcagccagaccccaaagggcccaggctccggacaatgcaccaactacgctctgctcaagttggccggagacgtggaatccaaccccggacccatggcgccacgacgggcgcgaggttgtagaaccttgggactgcctgccctccttctgcttttgcttttgcggccacccgccactcgagggataacctgtcctccgccaatgagtgttgaacatgcagacatctgggtgaagtcttatagtctttacagccgggagagatacatctgcaactcaggattcaagagaaaagcgggcacatcatccttgaccgagtgtgtgttgaacaaagcaactaatgtggcgcattggaccacaccctcactcaaatgtatcagagacggctccggggcaaccaacttctcactactcaaacaagctggggatgtggaagaaaaccccggccccatgccgctgctgctgctgttgcctctcctgtgggcgggagcactagcaaactgggtcaatgtcatttccgacctgaaaaaaatcgaggacctaatccagtccatgcacatcgacgctactctctacaccgaatcagacgtgcatccttcatgcaaagtgactgcgatgaaatgcttcctgctggaactccaagtgatctcgctggagagcggggatgcctcaattcacgataccgtggagaacctcatcatcctggcaaataactccttgagcagcaatgggaacgtgactgagtcgggttgcaaagagtgcgaagaactggaggaaaagaacattaaggagtttctgcaatcgtttgtccacatcgtgcagatgtttatcaacacctcctag

SEQ ID NO: 203 - DNA, 2871 bp, Artificial Sequence
  DNA sequence for the protein coding sequence of the NG-789P transgene cassette, including the stop codon
atgtgccatcaacagctggtcatcagctggttttcgctggtcttcctcgcgagccctctggtggccatctgggagctgaagaaggatgtgtacgtggtggagctcgactggtacccagacgctccaggagagatggtggtcctgacttgcgacaccccagaagaggacggaatcacctggaccctcgaccaatcatccgaggtgctgggaagcgggaagacgctgactatccaagtgaaggagttcggagatgccggtcagtatacttgccataagggaggagaagtgctgagccactccctgctactgctgcataagaaggaggatggaatctggagcaccgacatcctgaaggaccaaaaagaaccaaagaacaagacctttctcagatgcgaagccaagaattactcagggcgcttcacttgctggtggctgacgaccatctcgactgacctcacctttagcgtcaagtcgtcgcgggggagctccgacccgcaaggagtgacttgcggcgcggcgactctgtcagcggagagggtcagaggagacaacaaagaatacgaatactcggtggaatgccaagaggactcagcctgccctgcagcggaggagtcgctgccgatcgaggtgatggtggatgccgtgcacaaactcaagtacgaaaactacacgtcgtcattcttcatccgggatatcatcaaacctgacccccctaagaacctgcaactaaagcctctgaaaaattcgcgccaggtggaagtgtcgtgggaataccctgacacttggtcgacgccccatagctatttctcactcactttctgcgtccaggtccagggtaaaagcaagcgggaaaaaaaggatcgcgtcttcacggataaaaccagcgcaaccgtcatctgccgcaagaacgcgtccatctcagtcagggcacaagaccgctactattcatcaagctggtccgaatgggcgtcggtgccctgctcaggcggcggaggctcaggaggaggtggaagcggaggcggaggatcgcgcaatctgccggtggcaacccctgaccccggcatgttcccgtgccttcaccattcccaaaacctgctgagagctgtgtcgaacatgctccagaaggctcgccaaactctggagttctatccgtgcacttcggaggaaatcgaccacgaagacatcactaaagacaaaaccagcaccgtggaagcatgcctgccgttggagctaaccaagaacgaatcatgcctgaactcccgcgagaccagctttatcacgaatggctcgtgcctggcaagccgcaaaacttcattcatgatggccctgtgcctgtcgtcgatctacgaggatctgaaaatgtaccaggtcgagttcaagacgatgaacgcgaaactgctaatggacccaaagcggcaaattttcctggatcaaaacatgctggcggtcatcgacgagttgatgcaggctctcaacttcaacagcgaaacggtgccacaaaagagcagcctggaggaaccagatttctacaagacgaaaattaagttgtgcatcctcctgcacgcgttcaggattcgcgctgtgactatcgaccgggtcatgtcgtacctgaacgccagcggcagcggggagggccgcgggagcctgctgacctgcggggatgtcgaggagaatccgggacctaaaaaatccggagtgctctttctcctggggatcatcctactcgtcctcattggtgtgcaggggaccccggtcgtccgcaaaggacggtgctcgtgcatttccaccaatcagggcaccattcacctacaatcgctgaaggatctcaagcagttcgctccgtccccatcatgcgaaaagatcgagatcatcgccaccctgaagaatggagtccagacctgcttgaacccggactccgccgatgtcaaagagctgatcaaaaaatgggaaaagcaagtctcgcaaaagaaaaaacagaaaaatggaaagaaacaccaaaagaagaaggtcctcaaagtcagaaagagccagaggagccgccagaagaagacgacgggctccggacaatgcaccaactacgctctgctcaagttggccggagacgtggaatccaaccccggacccatggcgccacgacgggcgcgaggttgtagaaccttgggactgcctgccctccttctgcttttgcttttgcggccacccgccactcgagggataacctgtcctccgccaatgagtgttgaacatgcagacatctgggtgaagtcttatagtctttacagccgggagagatacatctgcaactcaggattcaagagaaaagcgggcacatcatccttgaccgagtgtgtgttgaacaaagcaactaatgtggcgcattggaccacaccctcactcaaatgtatcagagacggctccggggcaaccaacttctcactactcaaacaagctggggatgtggaagaaaaccccggccccatgccgctgctgctgctgttgcctctcctgtgggcgggagcactagcaaactgggtcaatgtcatttccgacctgaaaaaaatcgaggacctaatccagtccatgcacatcgacgctactctctacaccgaatcagacgtgcatccttcatgcaaagtgactgcgatgaaatgcttcctgctggaactccaagtgatctcgctggagagcggggatgcctcaattcacgataccgtggagaacctcatcatcctggcaaataactccttgagcagcaatgggaacgtgactgagtcgggttgcaaagagtgcgaagaactggaggaaaagaacattaaggagtttctgcaatcgtttgtccacatcgtgcagatgtttatcaacacctcctag

SEQ ID NO: 204 - DNA, 3345 bp, Artificial Sequence
  DNA sequence for the protein coding sequence of the NG-790P transgene cassette, including the stop codon
atgtgccatcaacagctggtcatcagctggttttcgctggtcttcctcgcgagccctctggtggccatctgggagctgaagaaggatgtgtacgtggtggagctcgactggtacccagacgctccaggagagatggtggtcctgacttgcgacaccccagaagaggacggaatcacctggaccctcgaccaatcatccgaggtgctgggaagcgggaagacgctgactatccaagtgaaggagttcggagatgccggtcagtatacttgccataagggaggagaagtgctgagccactccctgctactgctgcataagaaggaggatggaatctggagcaccgacatcctgaaggaccaaaaagaaccaaagaacaagacctttctcagatgcgaagccaagaattactcagggcgcttcacttgctggtggctgacgaccatctcgactgacctcacctttagcgtcaagtcgtcgcgggggagctccgacccgcaaggagtgacttgcggcgcggcgactctgtcagcggagagggtcagaggagacaacaaagaatacgaatactcggtggaatgccaagaggactcagcctgccctgcagcggaggagtcgctgccgatcgaggtgatggtggatgccgtgcacaaactcaagtacgaaaactacacgtcgtcattcttcatccgggatatcatcaaacctgacccccctaagaacctgcaactaaagcctctgaaaaattcgcgccaggtggaagtgtcgtgggaataccctgacacttggtcgacgccccatagctatttctcactcactttctgcgtccaggtccagggtaaaagcaagcgggaaaaaaaggatcgcgtcttcacggataaaaccagcgcaaccgtcatctgccgcaagaacgcgtccatctcagtcagggcacaagaccgctactattcatcaagctggtccgaatgggcgtcggtgccctgctcaggcggcggaggctcaggaggaggtggaagcggaggcggaggatcgcgcaatctgccggtggcaacccctgaccccggcatgttcccgtgccttcaccattcccaaaacctgctgagagctgtgtcgaacatgctccagaaggctcgccaaactctggagttctatccgtgcacttcggaggaaatcgaccacgaagacatcactaaagacaaaaccagcaccgtggaagcatgcctgccgttggagctaaccaagaacgaatcatgcctgaactcccgcgagaccagctttatcacgaatggctcgtgcctggcaagccgcaaaacttcattcatgatggccctgtgcctgtcgtcgatctacgaggatctgaaaatgtaccaggtcgagttcaagacgatgaacgcgaaactgctaatggacccaaagcggcaaattttcctggatcaaaacatgctggcggtcatcgacgagttgatgcaggctctcaacttcaacagcgaaacggtgccacaaaagagcagcctggaggaaccagatttctacaagacgaaaattaagttgtgcatcctcctgcacgcgttcaggattcgcgctgtgactatcgaccgggtcatgtcgtacctgaacgccagcggcagcggggagggccgcgggagcctgctgacctgcggggatgtcgaggagaatccgggacctaaaaaatccggagtgctctttctcctggggatcatcctactcgtcctcattggtgtgcaggggaccccggtcgtccgcaaaggacggtgctcgtgcatttccaccaatcagggcaccattcacctacaatcgctgaaggatctcaagcagttcgctccgtccccatcatgcgaaaagatcgagatcatcgccaccctgaagaatggagtccagacctgcttgaacccggactccgccgatgtcaaagagctgatcaaaaaatgggaaaagcaagtctcgcaaaagaaaaaacagaaaaatggaaagaaacaccaaaagaagaaggtcctcaaagtcagaaagagccagaggagccgccagaagaagacgacgggaagcggggtgaagcaaactctgaactttgatctgctaaagctggctggagatgtggagagcaatccggggccggcacagtccctagctctgtcacttctgattctggtgctggcattcggtatccctcgcacgcaaggctcggacggtggggctcaggactgctgtctaaagtacagccagagaaagatccctgccaaggtggtgcgcagctacagaaagcaggagccttcactgggctgctcgatccccgccatcctgtttctgccaagaaaaagaagccaagccgagctgtgcgccgatccgaaggaactgtgggtgcagcagctgatgcagcacctggataagaccccgtcaccccaaaagccggcacagggatgccggaaggatcggggagcctcgaagaccggaaagaagggaaagggaagcaagggttgcaagagaactgagcgcagccagaccccaaagggcccaggctccggacaatgcaccaactacgctctgctcaagttggccggagacgtggaatccaaccccggacccatggcgccacgacgggcgcgaggttgtagaaccttgggactgcctgccctccttctgcttttgcttttgcggccacccgccactcgagggataacctgtcctccgccaatgagtgttgaacatgcagacatctgggtgaagtcttatagtctttacagccgggagagatacatctgcaactcaggattcaagagaaaagcgggcacatcatccttgaccgagtgtgtgttgaacaaagcaactaatgtggcgcattggaccacaccctcactcaaatgtatcagagacggctccggggcaaccaacttctcactactcaaacaagctggggatgtggaagaaaaccccggccccatgccgctgctgctgctgttgcctctcctgtgggcgggagcactagcaaactgggtcaatgtcatttccgacctgaaaaaaatcgaggacctaatccagtccatgcacatcgacgctactctctacaccgaatcagacgtgcatccttcatgcaaagtgactgcgatgaaatgcttcctgctggaactccaagtgatctcgctggagagcggggatgcctcaattcacgataccgtggagaacctcatcatcctggcaaataactccttgagcagcaatgggaacgtgactgagtcgggttgcaaagagtgcgaagaactggaggaaaagaacattaaggagtttctgcaatcgtttgtccacatcgtgcagatgtttatcaacacctcctag

SEQ ID NO: 205 - DNA, 2874 bp, Artificial Sequence
  DNA sequence for the protein coding sequence of the NG-791A transgene cassette, including the stop codon
atgtgccaccagcaactggtcatcagctggttttctctggtgtttctggccagccctctggtcgccatctgggaactgaagaaggacgtgtacgtggtcgagctggactggtatcccgatgctcccggcgagatggtggtgctgacatgcgatacacccgaggaagacggcatcacatggacactggaccagtcctccgaagtgctgggatccggcaagaccctcaccatccaagtgaaagagtttggcgatgctggccagtacacatgccacaaaggcggcgaagtgctctcccactctctgctgctgctccacaagaaagaggacggaatctggtccaccgacattctgaaggaccagaaagagcctaagaacaaaacatttctgaggtgcgaagccaagaactacagcggaaggttcacatgctggtggctgaccaccattagcaccgacctcaccttcagcgtcaaatcctccagaggcagctccgatcctcaaggcgtcacatgcggagccgctacactgtccgccgagagggtgaggggagacaacaaggagtatgagtacagcgtggagtgtcaagaggatagcgcttgtcccgctgctgaggaatctctgcctattgaggtgatggtggacgccgtccataagctgaagtacgaaaactacaccagctccttcttcattagagacatcatcaagcccgatccccccaagaatctgcagctcaagcctctgaagaatagcagacaagtcgaggtgagctgggagtatcccgacacatggagcacacctcacagctatttctctctgaccttctgcgtgcaagtgcaaggcaagagcaagagagagaagaaagatagagtgtttacagataagacaagcgccaccgtcatttgcagaaagaacgcctccatcagcgtgagagcccaagacagatattacagcagcagctggagcgaatgggcctccgtgccttgtagcggcggcggaggcagcggcggcggcggcagcggcggaggaggatctagaaatctgcccgtcgctacacccgaccccggaatgttcccttgtctgcaccacagccagaatctgctgagagccgtgtccaacatgctccaaaaagctagacagacactggagttctacccttgcacaagcgaggaaatcgaccacgaggacatcaccaaggataagaccagcaccgtggaagcttgtctgcctctggagctgacaaagaacgagagctgtctgaactctagagaaaccagcttcatcacaaatggcagctgtctggcctctagaaagacaagcttcatgatggccctctgtctgagcagcatctacgaggatctgaaaatgtaccaagtggagttcaagaccatgaacgccaagctcctcatggaccccaagaggcaaatttttctggatcagaatatgctcgccgtcatcgatgagctcatgcaagccctcaatttcaacagcgagaccgtgccccaaaagtcctccctcgaagagcccgacttctataagaccaaaatcaagctctgtattctgctgcacgcttttagaattagagccgtcacaatcgatagagtgatgagctacctcaacgcctccggaagcggcgagggcagaggatctctgctgacatgcggagatgtggaggaaaaccccggccctaagaagagcggcgtgctgtttctgctcggaattattctgctggtgctgatcggagtccaaggcacacccgtggtgaggaaaggcagatgcagctgcatcagcaccaaccaaggcacaatccacctccagtccctcaaggatctgaaacagtttgctccctcccctagctgcgagaagatcgagatcatcgccaccctcaagaacggcgtccagacatgtctgaatcccgactccgccgacgtcaaagagctgatcaagaagtgggagaaacaagtgagccaaaagaagaaacagaaaaacggaaagaagcatcagaagaaaaaagtgctgaaggtgaggaagagccagaggagcagacagaagaaaaccaccggatccggacaatgtaccaactacgctctgctgaagctggctggcgacgtggaatccaaccccggacccgcccctagaagggctagaggatgtagaaccctcggactccccgctctgctgctgctgctgctcctcagaccccccgctaccagaggaattacatgccctcctcccatgagcgtcgaacatgccgacatctgggtgaagagctactctctgtactctagagagaggtacatctgcaactccggctttaagaggaaggctggcaccagcagcctcacagagtgtgtgctgaacaaagctaccaacgtggcccattggaccaccccctctctgaagtgcattagggatggcagcggcgccaccaatttctctctgctgaaacaagccggagacgtggaagagaaccccggccccgactggacatggaggattctgtttctggtggccgctgctaccggcgcccattccaattgggtcaatgtgatctccgacctcaagaagatcgaggatctgatccagtccatgcacatcgatgccacactgtataccgaaagcgacgtgcaccccagctgcaaggtcaccgccatgaagtgctttctgctggaactccaagtgatctctctggagtccggcgatgcttccattcacgacacagtcgagaatctgatcattctcgccaacaacagcctctcctccaatggaaacgtgaccgagagcggctgtaaggagtgcgaggaactcgaggagaagaacatcaaggaatttctgcagtccttcgtccacatcgtccagatgttcatcaatacaagctga

SEQ ID NO: 206 - DNA, 3063 bp, Artificial Sequence
  DNA sequence for the protein coding sequence of the NG-792A transgene cassette, including the stop codon
atgtgccaccaacagctcgtcatcagctggttctccctcgtgtttctcgctagccctctggtggccatctgggagctcaaaaaggacgtgtacgtcgtggagctggactggtaccccgatgctcccggcgaaatggtcgtgctgacatgcgacacacccgaagaggatggcatcacatggacactggatcagagcagcgaagtcctcggaagcggcaagacactgaccattcaagtgaaggaattcggcgatgccggccagtacacatgtcacaagggaggcgaagtgctgagccattctctgctgctgctgcacaaaaaggaggatggcatttggagcaccgacattctgaaagaccagaaggagcccaagaacaaaacctttctgagatgcgaggccaaaaactatagcggaagattcacatgctggtggctcaccaccatctccaccgatctgacattctccgtgaagtcctctagaggatccagcgaccctcaaggcgtcacatgtggcgccgctacactgtccgctgaaagggtgagaggcgataacaaggagtacgagtactccgtcgagtgccaagaggatagcgcttgccccgccgctgaggagtctctgcctatcgaagtgatggtggacgctgtgcacaagctgaagtatgagaactatacaagctccttctttatcagagatatcattaagcccgatccccccaaaaatctccagctcaagcctctgaagaactctagacaagtggaagtgagctgggaataccccgacacatggagcaccccccatagctatttctccctcaccttttgcgtgcaagtgcaaggcaaaagcaagagggagaagaaggatagagtctttaccgacaagacctccgctaccgtcatctgtagaaagaacgcttccatctccgtgagggctcaagatagatattacagctccagctggtccgaatgggcctccgtgccttgtagcggaggaggaggatccggcggcggcggaagcggcggcggaggatccagaaatctgcccgtggccacccccgaccccggcatgtttccttgtctgcaccattcccagaaccttctgagagccgtgtccaacatgctgcagaaggctagacagacactcgaattctacccttgcaccagcgaagagattgaccacgaggacattaccaaggacaagacatccaccgtggaagcttgtctgcctctggagctgacaaagaacgagagctgcctcaattctagagagacaagcttcatcacaaacggcagctgtctggcttctagaaagacatccttcatgatggctctgtgtctgtccagcatctatgaagatctgaagatgtatcaagtggaattcaagacaatgaacgccaaactgctcatggaccccaagaggcagattttcctcgaccagaacatgctcgccgtgatcgacgagctgatgcaagctctgaacttcaactccgagacagtcccccagaaaagctctctggaggagcccgacttctacaaaaccaagattaagctgtgcatcctcctccacgcctttagaatcagagccgtcacaatcgatagagtcatgagctatctgaacgcctccggatccggagaaggaagaggctctctgctgacatgcggcgatgtggaagagaaccccggccccgctctgacatttgctctgctggtcgctctgctggtcctcagctgcaaatccagctgttccgtgggctgcgacctccctcagacacactctctgggctccagaaggacactgatgctcctcgcccagatgaggaggatcagcctcttcagctgcctcaaggataggcacgactttggcttcccccaagaagagtttggcaatcagttccaaaaggctgaaacaatccccgtgctccacgaaatgatccagcagattttcaatctgtttagcaccaaggattccagcgctgcttgggacgagacactgctggacaagttctacaccgagctctaccagcaactcaatgacctcgaggcttgcgtgatccaaggcgtcggagtgacagagacccctctgatgaaagaggactccattctggctgtgagaaagtacttccagagaatcaccctctatctgaaagagaaaaagtatagcccttgcgcttgggaagtggtgagggccgagatcatgaggagcttttctctgagcacaaacctccaagagtctctgagaagcaaggaaggcagcggacaatgcaccaattatgctctgctgaagctggccggagatgtggagagcaatcccggccccgctcccagaagagctagaggctgtagaacactcggactccccgctctgctgctgctgctgctgctgagaccccccgccacaagaggcatcacatgccctccccccatgtccgtcgagcacgccgatatctgggtcaagtcctactccctctactccagagagaggtacatctgtaacagcggattcaagaggaaggctggaacatcctctctgaccgagtgcgtgctgaacaaggccaccaatgtggctcactggaccaccccttccctcaaatgcattagagacggctccggagccaccaatttttctctgctcaagcaagctggcgacgtggaagagaatcccggacccgactggacatggagaattctctttctggtggctgccgccaccggcgcccattccaattgggtgaatgtgatcagcgatctgaagaagatcgaggacctcatccagagcatgcacatcgacgctacactgtacacagagagcgatgtccatcccagctgcaaggtgaccgccatgaaatgttttctgctggagctccaagtgatttccctcgagagcggagacgcttccatccacgacaccgtcgaaaatctgatcattctggccaacaactctctgagcagcaacggcaacgtgacagagagcggatgcaaggagtgcgaggagctggaggagaagaacattaaggagtttctgcaaagcttcgtgcacatcgtccagatgttcatcaacaccagctga

SEQ ID NO: 207 - DNA, 2877 bp, Artificial Sequence
  DNA sequence for the protein coding sequence of the NG-794A transgene cassette, including the stop codon
atgaagaagagcggagtgctgtttctgctgggaatcattctgctggtgctgattggcgtgcaaggcacacccgtggtcagaaaaggcagatgcagctgcatcagcacaaaccaaggcaccatccatctccagtctctgaaggatctcaagcagtttgcccccagccccagctgcgagaagatcgagatcatcgccacactgaaaaatggcgtgcaaacatgcctcaaccccgactccgccgatgtgaaggagctgattaagaagtgggagaagcaagtgtcccagaaaaagaaacaaaagaatggcaaaaaacatcagaagaagaaggtcctcaaggtgagaaagagccagaggtctagacagaaaaagacaaccggcagcggccagtgcaccaattacgctctgctgaaactggctggagatgtggagagcaaccccggccctatgtgccatcagcagctggtgattagctggttctctctggtgtttctggccagccccctcgtggctatctgggagctcaagaaggacgtgtacgtggtcgagctggattggtatcccgacgcccccggcgagatggtggtgctgacatgtgatacccccgaggaggacggaattacatggacactggaccaaagcagcgaagtgctgggcagcggcaaaacactgaccatccaagtgaaggagtttggcgatgctggacagtacacatgccacaagggcggagaagtgctcagccattctctgctgctgctccataagaaggaggatggaatctggtccaccgacattctgaaggaccaaaaggaacctaagaacaagacctttctgaggtgcgaggccaaaaactattccggaagattcacatgctggtggctgacaacaatcagcaccgacctcacattctccgtgaagagctctagaggcagcagcgatccccaaggcgtcacatgcggagccgccacactgagcgccgaaagggtgagaggcgacaataaggagtacgagtacagcgtcgagtgccaagaggactccgcttgtcccgctgccgaagaatccctccccatcgaagtgatggtggacgccgtgcacaaactgaaatacgaaaattacacatcctcctttttcattagagatatcatcaagcccgacccccccaagaacctccagctgaagcctctgaagaactctagacaagtggaggtgagctgggagtaccccgacacatggtccaccccccatagctacttctccctcaccttttgcgtgcaagtgcaaggcaagagcaagagggagaaaaaggatagagtgtttaccgacaagacctccgctacagtgatctgtagaaagaatgcctccatcagcgtgagagcccaagatagatattattcctccagctggagcgaatgggccagcgtcccttgttccggaggcggaggatccggcggaggaggctccggaggaggcggaagcagaaatctgcccgtggccacacccgatcccggcatgtttccttgcctccatcacagccagaatctgctgagggctgtgagcaacatgctgcaaaaggctagacagacactggagttctatccttgcacaagcgaggagatcgaccacgaagacatcaccaaggacaagaccagcacagtggaggcttgtctgcctctggagctcaccaagaacgagagctgtctgaattctagagaaaccagcttcatcaccaacggcagctgcctcgccagcagaaagacaagcttcatgatggccctctgcctcagcagcatttacgaggacctcaagatgtaccaagtcgagtttaaaaccatgaatgccaagctgctgatggaccccaagaggcagatctttctggaccagaatatgctggccgtgatcgatgagctcatgcaagctctgaacttcaactccgagaccgtgccccaaaagtcctctctggaagaacccgacttctacaagacaaagattaagctctgtattctgctgcacgcctttagaattagagccgtcaccattgatagagtgatgtcctatctcaacgcctccggcagcggagagggaagaggatctctgctgacatgcggagacgtggaggaaaatcccggccccgcccctagaagagctaggggatgtagaacactgggactccccgctctgctgctgctgctcctcctcagacctcccgctacaagaggcatcacatgcccccctcccatgagcgtcgagcacgctgacatttgggtgaaatcctactctctgtactctagagagaggtacatctgcaactccggattcaagagaaaggccggcacatcctctctgacagagtgcgtgctgaacaaggctaccaacgtggcccactggaccacaccttctctgaagtgcatcagagacggctccggcgctaccaacttttctctgctgaagcaagccggagatgtcgaggagaatcccggacccgactggacatggaggattctgtttctggtcgctgccgctaccggcgctcactccaactgggtcaatgtgatctccgatctgaaaaaaatcgaggatctgatccagagcatgcacattgacgccacactgtacaccgagtccgatgtgcaccctagctgtaaagtgaccgccatgaagtgttttctcctcgagctgcaagtgatctccctcgagagcggagatgccagcattcatgacaccgtggagaacctcattattctggccaacaatagcctctccagcaatggaaacgtcaccgaaagcggatgcaaggaatgcgaggagctcgaggagaagaacatcaaggagttcctccagagcttcgtgcatattgtccagatgtttatcaacacatcctga

SEQ ID NO: 208 - DNA, 3078 bp, Artificial Sequence
  DNA sequence for the protein coding sequence of the NG-795A transgene cassette, including the stop codon
atgtgccaccaacagctggtgatcagctggttctccctcgtgttcctcgcttcccctctggtggccatctgggagctgaagaaggacgtctacgtggtcgagctggactggtaccccgatgcccccggcgagatggtggtgctcacatgcgacacccccgaggaggatggcatcacatggacactggatcaaagctccgaagtgctgggctccggcaagaccctcaccattcaagtgaaggagttcggagacgccggccaatacacatgccacaaaggcggagaggtgctgtcccactctctgctgctgctgcataagaaggaggacggcatttggtccaccgacattctgaaagaccagaaggagcctaaaaataaaacctttctgagatgcgaggccaagaactactccggaagattcacatgctggtggctgaccacaatctccacagacctcaccttttccgtgaaatcctctagaggaagcagcgatcctcaaggagtgacatgcggcgctgctacactcagcgccgaaagagtgagaggagataacaaggagtacgagtacagcgtggagtgccaagaggattccgcttgtcccgctgccgaagagtccctccccattgaagtgatggtggacgccgtgcataaactgaaatacgagaattacacctccagcttttttattagagacattattaaacccgacccccccaaaaacctccagctcaagcccctcaaaaatagcagacaagtggaggtgagctgggagtatcccgatacatggagcaccccccacagctatttctccctcaccttctgtgtgcaagtgcaaggcaaatccaagagggagaagaaggatagagtgttcaccgacaaaaccagcgccaccgtcatctgcagaaaaaacgctagcatcagcgtcagagcccaagatagatattactcctccagctggtccgagtgggccagcgtcccttgttccggaggcggaggatccggaggaggaggaagcggcggaggaggctccagaaacctccccgtggctacacccgaccccggaatgtttccttgcctccaccactcccaaaatctgctcagagccgtgtccaacatgctccagaaggccagacaaacactggaattctacccttgcacctccgaggaaatcgatcacgaggacatcaccaaggacaagacaagcaccgtggaagcttgtctgcctctggaactcaccaagaacgagagctgtctgaactctagagaaacaagcttcattacaaacggcagctgtctggccagcagaaagacaagcttcatgatggctctgtgtctgtccagcatctacgaggatctgaagatgtaccaagtggagtttaaaaccatgaacgctaagctgctgatggaccctaagaggcagattttcctcgaccagaacatgctggccgtgattgacgaactgatgcaagctctgaacttcaacagcgagacagtgcctcaaaagtccagcctcgaggagcccgacttctacaagaccaagatcaagctgtgcattctgctgcatgccttcagaatcagagccgtcaccatcgatagagtcatgagctatctgaacgctagcggaagcggagagggaaggggaagcctcctcacatgtggcgatgtggaagaaaaccccggacccgctcaatctctggctctgtctctgctgattctggtgctggctttcggcatccccagaacacaaggcagcgatggcggcgctcaagactgctgtctgaagtacagccagaggaagatccccgccaaggtcgtgaggagctatagaaaacaagagccttctctgggatgttccattcccgccattctgttcctccccagaaagagatcccaagccgaactgtgtgccgaccccaaggagctgtgggtgcagcagctgatgcagcatctggacaagaccccttcccctcagaagcccgctcaaggctgcagaaaagataggggagccagcaagaccggcaagaagggaaagggatccaagggctgtaagagaaccgaaaggagccagacacccaagggacccggcagcggacagtgtacaaactacgctctgctgaagctggccggagacgtggaaagcaaccccggccccgcccctaggagagctagaggctgtagaacactgggactgcccgctctgctgctgctgctgctgctgagaccccccgccacaaggggaattacatgccctccccctatgtccgtcgagcacgccgacatctgggtgaagagctactccctctactctagagagaggtatatctgtaatagcggctttaagaggaaggccggaaccagctctctgaccgaatgcgtgctgaataaggctacaaacgtggcccactggacaacccccagcctcaagtgtattagggacgaacaaaagctcatcagcgaggaggatctggctgtgggacaagatacccaagaggtgatcgtcgtccctcactctctgccttttaaggtggtcgtcatcagcgccattctggctctggtcgtgctcaccatcatttctctgatcatcctcatcatgctctggcagaagaaacctagaggctccggcgctaccaatttctctctgctgaagcaagctggcgacgtcgaagaaaatcccggacccgactggacatggaggattctgtttctggtggctgctgccaccggagctcatagcaactgggtgaacgtcattagcgatctgaagaagattgaggatctgatccagtccatgcacatcgacgccacactctataccgagagcgatgtgcaccccagctgcaaggtgaccgccatgaaatgctttctgctggaactgcaagtgatctctctggagtccggcgacgccagcatccatgataccgtggagaatctgatcattctcgccaacaactctctgagcagcaacggcaatgtgacagaatccggctgcaaggagtgtgaagagctcgaggaaaagaatatcaaggagtttctgcagtccttcgtgcacatcgtccaaatgttcatcaatacaagctga

SEQ ID NO: 209 - DNA, 2901 bp, Artificial Sequence
  DNA sequence for the protein coding sequence of the NG-796A transgene cassette, including the stop codon
atgtgccaccaacagctggtgatcagctggttctccctcgtgttcctcgcttcccctctggtggccatctgggagctgaagaaggacgtctacgtggtcgagctggactggtaccccgatgcccccggcgagatggtggtgctcacatgcgacacccccgaggaggatggcatcacatggacactggatcaaagctccgaagtgctgggctccggcaagaccctcaccattcaagtgaaggagttcggagacgccggccaatacacatgccacaaaggcggagaggtgctgtcccactctctgctgctgctgcataagaaggaggacggcatttggtccaccgacattctgaaagaccagaaggagcctaaaaataaaacctttctgagatgcgaggccaagaactactccggaagattcacatgctggtggctgaccacaatctccacagacctcaccttttccgtgaaatcctctagaggaagcagcgatcctcaaggagtgacatgcggcgctgctacactcagcgccgaaagagtgagaggagataacaaggagtacgagtacagcgtggagtgccaagaggattccgcttgtcccgctgccgaagagtccctccccattgaagtgatggtggacgccgtgcataaactgaaatacgagaattacacctccagcttttttattagagacattattaaacccgacccccccaaaaacctccagctcaagcccctcaaaaatagcagacaagtggaggtgagctgggagtatcccgatacatggagcaccccccacagctatttctccctcaccttctgtgtgcaagtgcaaggcaaatccaagagggagaagaaggatagagtgttcaccgacaaaaccagcgccaccgtcatctgcagaaaaaacgctagcatcagcgtcagagcccaagatagatattactcctccagctggtccgagtgggccagcgtcccttgttccggaggcggaggatccggaggaggaggaagcggcggaggaggctccagaaacctccccgtggctacacccgaccccggaatgtttccttgcctccaccactcccaaaatctgctcagagccgtgtccaacatgctccagaaggccagacaaacactggaattctacccttgcacctccgaggaaatcgatcacgaggacatcaccaaggacaagacaagcaccgtggaagcttgtctgcctctggaactcaccaagaacgagagctgtctgaactctagagaaacaagcttcattacaaacggcagctgtctggccagcagaaagacaagcttcatgatggctctgtgtctgtccagcatctacgaggatctgaagatgtaccaagtggagtttaaaaccatgaacgctaagctgctgatggaccctaagaggcagattttcctcgaccagaacatgctggccgtgattgacgaactgatgcaagctctgaacttcaacagcgagacagtgcctcaaaagtccagcctcgaggagcccgacttctacaagaccaagatcaagctgtgcattctgctgcatgccttcagaatcagagccgtcaccatcgatagagtcatgagctatctgaacgctagcggaagcggagagggaaggggaagcctcctcacatgtggcgatgtggaagaaaaccccggacccgctcaatctctggctctgtctctgctgattctggtgctggctttcggcatccccagaacacaaggcagcgatggcggcgctcaagactgctgtctgaagtacagccagaggaagatccccgccaaggtcgtgaggagctatagaaaacaagagccttctctgggatgttccattcccgccattctgttcctccccagaaagagatcccaagccgaactgtgtgccgaccccaaggagctgtgggtgcagcagctgatgcagcatctggacaagaccccttcccctcagaagcccgctcaaggctgcagaaaagataggggagccagcaagaccggcaagaagggaaagggatccaagggctgtaagagaaccgaaaggagccagacacccaagggacccggcagcggacagtgtacaaactacgctctgctgaagctggccggagacgtggaaagcaaccccggccccgcccctaggagagctagaggctgtagaacactgggactgcccgctctgctgctgctgctgctgctgagaccccccgccacaaggggaattacatgccctccccctatgtccgtcgagcacgccgacatctgggtgaagagctactccctctactctagagagaggtatatctgtaatagcggctttaagaggaaggccggaaccagctctctgaccgaatgcgtgctgaataaggctacaaacgtggcccactggacaacccccagcctcaagtgtattagggacggctccggcgctaccaatttctctctgctgaagcaagctggcgacgtcgaagaaaatcccggacccgactggacatggaggattctgtttctggtggctgctgccaccggagctcatagcaactgggtgaacgtcattagcgatctgaagaagattgaggatctgatccagtccatgcacatcgacgccacactctataccgagagcgatgtgcaccccagctgcaaggtgaccgccatgaaatgctttctgctggaactgcaagtgatctctctggagtccggcgacgccagcatccatgataccgtggagaatctgatcattctcgccaacaactctctgagcagcaacggcaatgtgacagaatccggctgcaaggagtgtgaagagctcgaggaaaagaatatcaaggagtttctgcagtccttcgtgcacatcgtccaaatgttcatcaatacaagctga

SEQ ID NO: 210 - DNA, 2904 bp, Artificial Sequence
  DNA sequence for the protein coding sequence of the NG-799A transgene cassette, including the stop codon
atggcccagtctctggctctgtctctgctgattctcgtgctggcttttggcatccctagaacccaaggcagcgacggcggagctcaagactgttgtctgaagtactcccagaggaagattcccgccaaggtggtgaggagctacagaaagcaagagcccagcctcggatgctccatccccgccattctgtttctgcctaggaagagatcccaagccgagctgtgtgctgaccccaaagagctgtgggtgcagcagctgatgcaacatctcgataagaccccctcccctcagaaacccgcccaaggctgtagaaaggataggggagcctccaagaccggcaagaagggcaagggcagcaagggctgcaagaggaccgagagatcccagacccctaagggacccggcagcggccagtgcacaaattacgctctgctgaagctcgctggcgacgtggagtccaaccccggccccgcccctaggagggctaggggatgcagaacactgggactgcccgctctgctgctgctgctgctgctgagaccccccgccaccagaggcattacatgtcctccccccatgagcgtggagcacgccgacatctgggtcaagtcctattctctgtactctagagagagatatatctgcaactccggattcaaaaggaaggctggcaccagctctctgacagagtgcgtgctgaacaaagccacaaacgtggctcactggaccaccccctccctcaagtgtattagagacggatccggcgccaccaatttctctctgctgaaacaagccggagacgtggaagagaatcccggacccgactggacatggaggatcctctttctggtggctgctgctaccggcgcccatagcaactgggtgaacgtgatcagcgatctgaaaaagattgaggatctgattcagagcatgcatatcgacgccacactgtataccgagagcgatgtgcaccctagctgcaaagtcaccgccatgaagtgctttctgctcgagctgcaagtgatttctctggagagcggcgatgcctccatccacgacaccgtggagaacctcatcattctggctaacaactccctctcctccaatggcaacgtcacagagtccggctgtaaggagtgcgaagaactcgaagagaaaaatatcaaagaattcctccagagcttcgtgcacatcgtccagatgtttattaacacaagcggctccggagaaggcagaggctccctcctcacatgtggcgacgtcgaggagaatcccggccccatgtgccatcagcagctcgtgatcagctggttctctctggtctttctcgccagccctctcgtcgctatttgggagctcaagaaggacgtgtacgtcgtggaactcgattggtatcccgatgctcccggcgaaatggtggtgctgacatgcgacacacccgaggaagacggcattacatggacactggatcagtccagcgaggtcctcggcagcggcaagaccctcaccattcaagtgaaggaattcggcgacgccggccagtatacatgccacaagggcggagaagtgctctcccactctctgctgctgctgcacaagaaagaggacggcatctggtccaccgacattctcaaggaccagaaagagcctaaaaacaaaacatttctgaggtgcgaggctaagaactactccggaaggttcacatgctggtggctcaccaccatcagcacagatctgaccttcagcgtcaaatcctctagaggctcctccgatcctcaaggcgtgacatgcggcgctgctacactgtccgctgagagggtgaggggcgacaacaaggagtatgagtacagcgtggaatgccaagaggatagcgcttgccccgccgctgaagaatctctgcctatcgaagtcatggtggatgccgtgcataagctgaagtacgagaattacacaagcagcttcttcatcagagacatcattaagcccgatccccccaagaatctgcaactgaagcctctgaagaattctagacaagtggaagtcagctgggagtaccccgacacatggagcaccccccattcctacttctccctcaccttttgtgtccaagtgcaaggcaagtccaagagggagaagaaggatagggtgttcacagataaaaccagcgccaccgtcatctgtagaaagaatgcctccatttccgtgagggctcaagatagatactacagctccagctggagcgagtgggcttccgtcccttgctccggaggaggaggaagcggaggaggcggaagcggcggcggaggcagcagaaatctgcccgtggctacacccgatcccggcatgtttccttgcctccaccatagccagaatctgctgagggctgtctccaacatgctccagaaggctagacagaccctcgaattctacccttgcaccagcgaggagattgaccacgaggacatcaccaaggacaagacatccacagtcgaggcttgtctgcctctggaactcaccaagaatgagagctgtctgaactctagagagacatccttcatcaccaacggaagctgtctcgcttctagaaaaacaagcttcatgatggctctgtgtctgagctccatctacgaggatctgaagatgtaccaagtggagttcaagaccatgaacgctaagctgctgatggaccccaagaggcagatcttcctcgatcagaacatgctcgccgtgattgacgagctgatgcaagctctgaactttaactccgagacagtcccccagaagagctccctcgaagagcccgacttttacaagacaaaaattaagctgtgtattctgctgcatgcctttagaattagagccgtgaccatcgatagggtgatgagctacctcaatgctagctaa

SEQ ID NO: 211 - DNA, 33379 bp, Artificial Sequence
  Genome sequence of NG-748 virus
tctatctatataatataccttatagatggaatggtgccaatatgtaaatgaggtgattttaaaaagtgtggatcgtgtggtgattggctgtggggttaacggctaaaaggggcggtgcgaccgtgggaaaatgacgttttgtgggggtggagtttttttgcaagttgtcgcgggaaatgtgacgcataaaaaggcttttttctcacggaactacttagttttcccacggtatttaacaggaaatgaggtagttttgaccggatgcaagtgaaaattgttgattttcgcgcgaaaactgaatgaggaagtgtttttctgaataatgtggtatttatggcagggtggagtatttgttcagggccaggtagactttgacccattacgtggaggtttcgattaccgtgttttttacctgaatttccgcgtaccgtgtcaaagtcttctgtttttacgtaggtgtcagctgatcgctagggtatttatacctcagggtttgtgtcaagaggccactcttgagtgccagcgagaagagttttctcctctgcgccggcagtttaataataaaaaaatgagagatttgcgatttctgcctcaggaaataatctctgctgagactggaaatgaaatattggagcttgtggtgcacgccctgatgggagacgatccggagccacctgtgcagctttttgagcctcctacgcttcaggaactgtatgatttagaggtagagggatcggaggattctaatgaggaagctgtaaatggcttttttaccgattctatgcttttagctgctaatgaagggttagaattagatccgcctttggacacttttgatactccaggggtaattgtggaaagcggtacaggtgtaagaaaattacctgatttgagttccgtggactgtgatttgcactgctatgaagacgggtttcctccgagtgatgaggaggaccatgaaaaggagcagtccatgcagactgcagcgggtgagggagtgaaggctgccaatgttggttttcagttggattgcccggagcttcctggacatggctgtaagtcttgtgaatttcacaggaaaaatactggagtaaaggaactgttatgttcgctttgttatatgagaacgcactgccactttatttacagtaagtgtgtttaagttaaaatttaaaggaatatgctgtttttcacatgtatattgagtgtgagttttgtgcttcttattataggtcctgtgtctgatgctgatgaatcaccatctcctgattctactacctcacctcctgagattcaagcacctgttcctgtggacgtgcgcaagcccattcctgtgaagcttaagcctgggaaacgtccagcagtggaaaaacttgaggacttgttacagggtggggacggacctttggacttgagtacacggaaacgtccaagacaataagtgttccatatccgtgtttacttaaggtgacgtcaatatttgtgtgacagtgcaatgtaataaaaatatgttaactgttcactggtttttattgctttttgggcggggactcaggtatataagtagaagcagacctgtgtggttagctcataggagctggctttcatccatggaggtttgggccattttggaagaccttaggaagactaggcaactgttagagaacgcttcggacggagtctccggtttttggagattctggttcgctagtgaattagctagggtagtttttaggataaaacaggactataaacaagaatttgaaaagttgttggtagattgcccaggactttttgaagctcttaatttgggccatcaggttcactttaaagaaaaagttttatcagttttagacttttcaaccccaggtagaactgctgctgctgtggcttttcttacttttatattagataaatggatcccgcagactcatttcagcaggggatacgttttggatttcatagccacagcattgtggagaacatggaaggttcgcaagatgaggacaatcttaggttactggccagtgcagcctttgggtgtagcgggaatcctgaggcatccaccggtcatgccagcggttctggaggaggaacagcaagaggacaacccgagagccggcctggaccctccagtggaggaggcggagtagctgacttgtctcctgaactgcaacgggtgcttactggatctacgtccactggacgggataggggcgttaagagggagagggcatctagtggtactgatgctagatctgagttggctttaagtttaatgagtcgcagacgtcctgaaaccatttggtggcatgaggttcagaaagagggaagggatgaagtttctgtattgcaggagaaatattcactggaacaggtgaaaacatgttggttggagcctgaggatgattgggaggtggccattaaaaattatgccaagatagctttgaggcctgataaacagtataagattactagacggattaatatccggaatgcttgttacatatctggaaatggggctgaggtggtaatagatactcaagacaaggcagttattagatgctgcatgatggatatgtggcctggggtagtcggtatggaagcagtaacttttgtaaatgttaagtttaggggagatggttataatggaatagtgtttatggccaataccaaacttatattgcatggttgtagcttttttggtttcaacaatacctgtgtagatgcctggggacaggttagtgtacggggatgtagtttctatgcgtgttggattgccacagctggcagaaccaagagtcaattgtctctgaagaaatgcatatttcaaagatgtaacctgggcattctgaatgaaggcgaagcaagggtccgccactgcgcttctacagatactggatgttttattttgattaagggaaatgccagcgtaaagcataacatgatttgcggtgcttccgatgagaggccttatcaaatgctcacttgtgctggtgggcattgtaatatgctggctactgtgcatattgtttcccatcaacgcaaaaaatggcctgtttttgatcacaatgtgatgacgaagtgtaccatgcatgcaggtgggcgtagaggaatgtttatgccttaccagtgtaacatgaatcatgtgaaagtgttgttggaaccagatgccttttccagaatgagcctaacaggaatttttgacatgaacatgcaaatctggaagatcctgaggtatgatgatacgagatcgagggtacgcgcatgcgaatgcggaggcaagcatgccaggttccagccggtgtgtgtagatgtgactgaagatctcagaccggatcatttggttattgcccgcactggagcagagttcggatccagtggagaagaaactgactaaggtgagtattgggaaaactttggggtgggattttcagatggacagattgagtaaaaatttgttttttctgtcttgcagctgtcatgagtggaaacgcttcttttaaggggggagtcttcagcccttatctgacagggcgtctcccatcctgggcaggagttcgtcagaatgttatgggatctactgtggatggaagacccgtccaacccgccaattcttcaacgctgacctatgctactttaagttcttcacctttggacgcagctgcagctgccgccgccgcttctgttgccgctaacactgtgcttggaatgggttactatggaagcatcatggctaattccacttcctctaataacccttctaccctgactcaggacaagttacttgtccttttggcccagctggaggctttgacccaacgtctgggtgaactttctcagcaggtggtcgagttgcgagtacaaactgagtctgctgtcggcacggcaaagtctaaataaaaaaatcccagaatcaatgaataaataaacaagcttgttgttgatttaaaatcaagtgtttttatttcatttttcgcgcacggtatgccctagaccaccgatctctatcattgagaactcggtggattttttccaggatcctatagaggtgggattgaatgtttagatacatgggcattaggccgtctttggggtggagatagctccattgaagggattcatgctccggggtagtgttgtaaatcacccagtcataacaaggtcgcagtgcatggtgttgcacaatatcttttagaagtaggctgattgccacagataagcccttggtgtaggtgtttacaaaccggttgagctgggatgggtgcattcggggtgaaattatgtgcattttggattggatttttaagttggcaatattgccgccaagatcccgtcttgggttcatgttatgaaggaccaccaagacggtgtatccggtacatttaggaaatttatcgtgcagcttggatggaaaagcgtggaaaaatttggagacacccttgtgtcctccaagattttccatgcactcatccatgataatagcaatggggccgtgggcagcggcgcgggcaaacacgttccgtgggtctgacacatcatagttatgttcctgagttaaatcatcataagccattttaatgaatttggggcggagagtaccagattggggtatgaatgttccttcgggccccggagcatagttcccctcacagatttgcatttcccaagctttcagttccgagggtggaatcatgtccacctggggggctatgaaaaacaccgtttctggggcgggggtgattaattgtgatgatagcaaatttctgagcaattgagatttgccacatccggtggggccataaatgattccgattacgggttgcaggtggtagtttagggaacggcaactgccgtcttctcgaagcaagggggccacctcgttcatcatttcccttacatgcatattttcccgcaccaaatccattaggaggcgctctcctcctagtgatagaagttcttgtagtgaggaaaagtttttcagcggtttcagaccgtcagccatgggcattttggagagagtttgctgcaaaagttctagtctgttccacagttcagtgatgtgttctatggcatctcgatccagcagacctcctcgtttcgcgggtttggacggctcctggaatagggtatgagacgatgggcgtccagcgctgccagggttcggtccttccagggtctcagtgttcgagtcagggttgtttccgtcacagtgaaggggtgtgcgcctgcttgggcgcttgccagggtgcgcttcagactcatcctgctggtcgaaaacttctgtcgcttggcgccctgtatgtcggccaagtagcagtttaccatgagttcgtagttgagcgcctcggctgcgtggcctttggcgcggagcttacctttggaagttttcttgcataccgggcagtataggcatttcagcgcatacaacttgggcgcaaggaaaacggattctggggagtatgcatctgcgccgcaggaggcgcaaacagtttcacattccaccagccaggttaaatccggttcattggggtcaaaaacaagttttccgccatattttttgatgcgtttcttacctttggtctccatgagttcgtgtcctcgttgagtgacaaacaggctgtccgtgtccccgtagactgattttacaggcctcttctccagtggagtgcctcggtcttcttcgtacaggaactctgaccactctgatacaaaggcgcgcgtccaggccagcacaaaggaggctatgtgggaggggtagcgatcgttgtcaaccagggggtccaccttttccaaagtatgcaaacacatgtcaccctcttcaacatccaggaatgtgattggcttgtaggtgtatttcacgtgacctggggtccccgctgggggggtataaaagggggcggttctttgctcttcctcactgtcttccggatcgctgtccaggaacgtcagctgttggggtaggtattccctctcgaaggcgggcatgacctctgcactcaggttgtcagtttctaagaacgaggaggatttgatattgacagtgccggttgagatgcctttcatgaggttttcgtccatctggtcagaaaacacaatttttttattgtcaagtttggtggcaaatgatccatacagggcgttggataaaagtttggcaatggatcgcatggtttggttcttttccttgtccgcgcgctctttggcggcgatgttgagttggacatactcgcgtgccaggcacttccattcggggaagatagttgttaattcatctggcacgattctcacttgccaccctcgattatgcaaggtaattaaatccacactggtggccacctcgcctcgaaggggttcattggtccaacagagcctacctcctttcctagaacagaaagggggaagtgggtctagcataagttcatcgggagggtctgcatccatggtaaagattcccggaagtaaatccttatcaaaatagctgatgggagtggggtcatctaaggccatttgccattctcgagctgccagtgcgcgctcatatgggttaaggggactgccccatggcatgggatgggtgagtgcagaggcatacatgccacagatgtcatagacgtagatgggatcctcaaagatgcctatgtaggttggatagcatcgcccccctctgatacttgctcgcacatagtcatatagttcatgtgatggcgctagcagccccggacccaagttggtgcgattgggtttttctgttctgtagacgatctggcgaaagatggcgtgagaattggaagagatggtgggtctttgaaaaatgttgaaatgggcatgaggtagacctacagagtctctgacaaagtgggcataagattcttgaagcttggttaccagttcggcggtgacaagtacgtctagggcgcagtagtcaagtgtttcttgaatgatgtcataacctggttggtttttcttttcccacagttcgcggttgagaaggtattcttcgcgatccttccagtactcttctagcggaaacccgtctttgtctgcacggtaagatcctagcatgtagaactgattaactgccttgtaagggcagcagcccttctctacgggtagagagtatgcttgagcagcttttcgtagcgaagcgtgagtaagggcaaaggtgtctctgaccatgactttgaggaattggtatttgaagtcgatgtcgtcacaggctccctgttcccagagttggaagtctacccgtttcttgtaggcggggttgggcaaagcgaaagtaacatcattgaagagaatcttgccggccctgggcatgaaattgcgagtgatgcgaaaaggctgtggtacttccgctcggttattgataacctgggcagctaggacgatctcgtcgaaaccgttgatgttgtgtcctacgatgtataattctatgaaacgcggcgtgcctctgacgtgaggtagcttactgagctcatcaaaggttaggtctgtggggtcagataaggcgtagtgttcgagagcccattcgtgcaggtgaggattcgctttaaggaaggaggaccagaggtccactgccagtgctgtttgtaactggtcccggtactgacgaaaatgccgtccgactgccattttttctggggtgacgcaatagaaggtttgggggtcctgccgccagcgatcccacttgagttttatggcgaggtcataggcgatgttgacgagccgctggtctccagagagtttcatgaccagcatgaaggggattagctgcttgccaaaggaccccatccaggtgtaggtttccacatcgtaggtgagaaagagcctttctgtgcgaggatgagagccaatcgggaagaactggatctcctgccaccagttggaggaatggctgttgatgtgatggaagtagaactccctgcgacgcgccgagcattcatgcttgtgcttgtacagacggccgcagtagtcgcagcgttgcacgggttgtatctcgtgaatgagttgtacctggcttcccttgacgagaaatttcagtgggaagccgaggcctggcgattgtatctcgtgctttactatgttgtctgcatcggcctgttcatcttctgtctcgatggtggtcatgctgacgagccctcgcgggaggcaagtccagacctcggcgcggcaggggcggagctcgaggacgagagcgcgcaggctggagctgtccagggtcctgagacgctgcggactcaggttagtaggcagtgtcaggagattaacttgcatgatcttttggagggcgtgcgggaggttcagatagtacttgatctcaacgggtccgttggtggagatgtcgatggcttgcagggttccgtgtcccttgggcgctaccaccgtgcccttgtttttcattttggacggcggtggctctgttgcttcttgcatgtttagaagcggtgtcgagggcgcgcaccgggcggcaggggcggctcgggacccggcggcatggctggcagtggtacgtcggcgccgcgcgcgggtaggttctggtactgcgccctgagaagactcgcatgcgcgacgacgcggcggttgacatcctggatctgacgcctctgggtgaaagctaccggccccgtgagcttgaacctgaaagagagttcaacagaatcaatctcggtatcgttgacggcggcttgcctaaggatttcttgcacgtcaccagagttgtcctggtaggcgatctccgccatgaactgctcgatctcttcctcttgaagatctccgcggcccgctctctcgacggtggccgcgaggtcgttggagatgcgcccaatgagttgagagaatgcattcatgcccgcctcgttccagacgcggctgtagaccacggcccccacgggatctctcgcgcgcatgaccacctgggcgaggttgagctccacgtggcgggtgaagaccgcatagttgcataggcgctggaaaaggtagttgagtgtggtggcgatgtgctcggtgacgaagaaatacatgatccatcgtctcagcggcatctcgctgacatcgcccagagcttccaagcgctccatggcctcgtagaagtccacggcaaaattaaaaaactgggagtttcgcgcggacacggtcaactcctcttccagaagacggataagttcggcgatggtggtgcgcacctcgcgctcgaaagcccctgggatttcttcctcaatctcttcttcttccactaacatctcttcctcttcaggtggggctgcaggaggagggggaacgcggcgacgccggcggcgcacgggcagacggtcgatgaatctttcaatgacctctccgcggcggcggcgcatggtttcagtgacggcgcggccgttctcgcgcggtcgcagagtaaaaacaccgccgcgcatctccttaaagtggtgactgggaggttctccgtttgggagggagagggcgctgattatacattttattaattggcccgtagggactgcacgcagagatctgatcgtgtcaagatccacgggatctgaaaacctttcgacgaaagcgtctaaccagtcacagtcacaaggtaggctgagtacggcttcttgtgggcgggggtggttatgtgttcggtctgggtcttctgtttcttcttcatctcgggaaggtgagacgatgctgctggtgatgaaattaaagtaggcagttctaagacggcggatggtggcgaggagcaccaggtctttgggtccggcttgctggatacgcaggcgattggccattccccaagcattatcctgacatctagcaagatctttgtagtagtcttgcatgagccgttctacgggcacttcttcctcacccgttctgccatgcatacgtgtgagtccaaatccgcgcattggttgtaccagtgccaagtcagctacgactctttcggcgaggatggcttgctgtacttgggtaagggtggcttgaaagtcatcaaaatccacaaagcggtggtaagctcctgtattaatggtgtaagcacagttggccatgactgaccagttaactgtctggtgaccagggcgcacgagctcggtgtatttaaggcgcgaataggcgcgggtgtcaaagatgtaatcgttgcaggtgcgcaccagatactggtaccctataagaaaatgcggcggtggttggcggtagagaggccatcgttctgtagctggagcgccaggggcgaggtcttccaacataaggcggtgatagccgtagatgtacctggacatccaggtgattcctgcggcggtagtagaagcccgaggaaactcgcgtacgcggttccaaatgttgcgtagcggcatgaagtagttcattgtaggcacggtttgaccagtgaggcgcgcgcagtcattgatgctctatagacacggagaaaatgaaagcgttcagcgactcgactccgtagcctggaggaacgtgaacgggttgggtcgcggtgtaccccggttcgagacttgtactcgagccggccggagccgcggctaacgtggtattggcactcccgtctcgacccagcctacaaaaatccaggatacggaatcgagtcgttttgctggtttccgaatggcagggaagtgagtcctattttttttttttgccgctcagatgcatcccgtgctgcgacagatgcgcccccaacaacagcccccctcgcagcagcagcagcagcaatcacaaaaggctgtccctgcaactactgcaactgccgccgtgagcggtgcgggacagcccgcctatgatctggacttggaagagggcgaaggactggcacgtctaggtgcgccttcacccgagcggcatccgcgagttcaactgaaaaaagattctcgcgaggcgtatgtgccccaacagaacctatttagagacagaagcggcgaggagccggaggagatgcgagcttcccgctttaacgcgggtcgtgagctgcgtcacggtttggaccgaagacgagtgttgcgggacgaggatttcgaagttgatgaaatgacagggatcagtcctgccagggcacacgtggctgcagccaaccttgtatcggcttacgagcagacagtaaaggaagagcgtaacttccaaaagtcttttaataatcatgtgcgaaccctgattgcccgcgaagaagttacccttggtttgatgcatttgtgggatttgatggaagctatcattcagaaccctactagcaaacctctgaccgcccagctgtttctggtggtgcaacacagcagagacaatgaggctttcagagaggcgctgctgaacatcaccgaacccgaggggagatggttgtatgatcttatcaacattctacagagtatcatagtgcaggagcggagcctgggcctggccgagaaggtggctgccatcaattactcggttttgagcttgggaaaatattacgctcgcaaaatctacaagactccatacgttcccatagacaaggaggtgaagatagatgggttctacatgcgcatgacgctcaaggtcttgaccctgagcgatgatcttggggtgtatcgcaatgacagaatgcatcgcgcggttagcgccagcaggaggcgcgagttaagcgacagggaactgatgcacagtttgcaaagagctctgactggagctggaaccgagggtgagaattacttcgacatgggagctgacttgcagtggcagcctagtcgcagggctctgagcgccgcgacggcaggatgtgagcttccttacatagaagaggcggatgaaggcgaggaggaagagggcgagtacttggaagactgatggcacaacccgtgttttttgctagatggaacagcaagcaccggatcccgcaatgcgggcggcgctgcagagccagccgtccggcattaactcctcggacgattggacccaggccatgcaacgtatcatggcgttgacgactcgcaaccccgaagcctttagacagcaaccccaggccaaccgtctatcggccatcatggaagctgtagtgccttcccgctctaatcccactcatgagaaggtcctggccatcgtgaacgcgttggtggagaacaaagctattcgtccagatgaggccggactggtatacaacgctctcttagaacgcgtggctcgctacaacagtagcaatgtgcaaaccaatttggaccgtatgataacagatgtacgcgaagccgtgtctcagcgcgaaaggttccagcgtgatgccaacctgggttcgctggtggcgttaaatgctttcttgagtactcagcctgctaatgtgccgcgtggtcaacaggattatactaactttttaagtgctttgagactgatggtatcagaagtacctcagagcgaagtgtatcagtccggtcctgattacttctttcagactagcagacagggcttgcagacggtaaatctgagccaagcttttaaaaaccttaaaggtttgtggggagtgcatgccccggtaggagaaagagcaaccgtgtctagcttgttaactccgaactcccgcctattattactgttggtagctcctttcaccgacagcggtagcatcgaccgtaattcctatttgggttacctactaaacctgtatcgcgaagccatagggcaaagtcaggtggacgagcagacctatcaagaaattacccaagtcagtcgcgctttgggacaggaagacactggcagtttggaagccactctgaacttcttgcttaccaatcggtctcaaaagatccctcctcaatatgctcttactgcggaggaggagaggatccttagatatgtgcagcagagcgtgggattgtttctgatgcaagagggggcaactccgactgcagcactggacatgacagcgcgaaatatggagcccagcatgtatgccagtaaccgacctttcattaacaaactgctggactacttgcacagagctgccgctatgaactctgattatttcaccaatgccatcttaaacccgcactggctgcccccacctggtttctacacgggcgaatatgacatgcccgaccctaatgacggatttctgtgggacgacgtggacagcgatgttttttcacctctttctgatcatcgcacgtggaaaaaggaaggcggcgatagaatgcattcttctgcatcgctgtccggggtcatgggtgctaccgcggctgagcccgagtctgcaagtccttttcctagtctacccttttctctacacagtgtacgtagcagcgaagtgggtagaataagtcgcccgagtttaatgggcgaagaggagtatctaaacgattccttgctcagaccggcaagagaaaaaaatttcccaaacaatggaatagaaagtttggtggataaaatgagtagatggaagacttatgctcaggatcacagagacgagcctgggatcatggggattacaagtagagcgagccgtagacgccagcgccatgacagacagaggggtcttgtgtgggacgatgaggattcggccgatgatagcagcgtgctggacttgggtgggagaggaaggggcaacccgtttgctcatttgcgccctcgcttgggtggtatgttgtaaaaaaaaataaaaaaaaaactcaccaaggccatggcgacgagcgtacgttcgttcttctttattatctgtgtctagtataatgaggcgagtcgtgctaggcggagcggtggtgtatccggagggtcctcctccttcgtacgagagcgtgatgcagcagcagcaggcgacggcggtgatgcaatccccactggaggctccctttgtgcctccgcgatacctggcacctacggagggcagaaacagcattcgttattcggaactggcacctcagtacgataccaccaggttgtatctggtggacaacaagtcggcggacattgcttctctgaactatcagaatgaccacagcaacttcttgaccacggtggtgcaaaacaatgactttacccctacggaagccagcacccagaccattaactttgatgaacgatcgcggtggggcggtcagctaaagaccatcatgcatactaacatgccaaacgtgaacgagtatatgtttagtaacaagttcaaagcgcgtgtgatggtgtccagaaaacctcccgacggtgctgcagttggggatacttatgatcacaagcaggatattttgaaatatgagtggttcgagtttactttgccagaaggcaacttttcagttactatgactattgatttgatgaacaatgccatcatagataattacttgaaagtgggtagacagaatggagtgcttgaaagtgacattggtgttaagttcgacaccaggaacttcaagctgggatgggatcccgaaaccaagttgatcatgcctggagtgtatacgtatgaagccttccatcctgacattgtcttactgcctggctgcggagtggattttaccgagagtcgtttgagcaaccttcttggtatcagaaaaaaacagccatttcaagagggttttaagattttgtatgaagatttagaaggtggtaatattccggccctcttggatgtagatgcctatgagaacagtaagaaagaacaaaaagccaaaatagaagctgctacagctgctgcagaagctaaggcaaacatagttgccagcgactctacaagggttgctaacgctggagaggtcagaggagacaattttgcgccaacacctgttccgactgcagaatcattattggccgatgtgtctgaaggaacggacgtgaaactcactattcaacctgtagaaaaagatagtaagaatagaagctataatgtgttggaagacaaaatcaacacagcctatcgcagttggtatctttcgtacaattatggcgatcccgaaaaaggagtgcgttcctggacattgctcaccacctcagatgtcacctgcggagcagagcaggtctactggtcgcttccagacatgatgaaggatcctgtcactttccgctccactagacaagtcagtaactaccctgtggtgggtgcagagcttatgcccgtcttctcaaagagcttctacaacgaacaagctgtgtactcccagcagctccgccagtccacctcgcttacgcacgtcttcaaccgctttcctgagaaccagattttaatccgtccgccggcgcccaccattaccaccgtcagtgaaaacgttcctgctctcacagatcacgggaccctgccgttgcgcagcagtatccggggagtccaacgtgtgaccgttactgacgccagacgccgcacctgtccctacgtgtacaaggcactgggcatagtcgcaccgcgcgtcctttcaagccgcactttctaaaaaaaaaaaaaatgtccattcttatctcgcccagtaataacaccggttggggtctgcgcgctccaagcaagatgtacggaggcgcacgcaaacgttctacccaacatcctgtccgtgttcgcggacattttcgcgctccatggggcgccctcaagggccgcactcgcgttcgaaccaccgtcgatgatgtaatcgatcaggtggttgccgacgcccgtaattatactcctactgcgcctacatctactgtggatgcagttattgacagtgtagtggctgacgctcgcaactatgctcgacgtaagagccggcgaaggcgcattgccagacgccaccgagctaccactgccatgcgagccgcaagagctctgctacgaagagctagacgcgtggggcgaagagccatgcttagggcggccagacgtgcagcttcgggcgccagcgccggcaggtcccgcaggcaagcagccgctgtcgcagcggcgactattgccgacatggcccaatcgcgaagaggcaatgtatactgggtgcgtgacgctgccaccggtcaacgtgtacccgtgcgcacccgtccccctcgcacttagaagatactgagcagtctccgatgttgtgtcccagcggcgaggatgtccaagcgcaaatacaaggaagaaatgctgcaggttatcgcacctgaagtctacggccaaccgttgaaggatgaaaaaaaaccccgcaaaatcaagcgggttaaaaaggacaaaaaagaagaggaagatggcgatgatgggctggcggagtttgtgcgcgagtttgccccacggcgacgcgtgcaatggcgtgggcgcaaagttcgacatgtgttgagacctggaacttcggtggtctttacacccggcgagcgttcaagcgctacttttaagcgttcctatgatgaggtgtacggggatgatgatattcttgagcaggcggctgaccgattaggcgagtttgcttatggcaagcgtagtagaataacttccaaggatgagacagtgtcgatacccttggatcatggaaatcccacccctagtcttaaaccggtcactttgcagcaagtgttacccgtaactccgcgaacaggtgttaaacgcgaaggtgaagatttgtatcccactatgcaactgatggtacccaaacgccagaagttggaggacgttttggagaaagtaaaagtggatccagatattcaacctgaggttaaagtgagacccattaagcaggtagcgcctggtctgggggtacaaactgtagacattaagattcccactgaaagtatggaagtgcaaactgaacccgcaaagcctactgccacctccactgaagtgcaaacggatccatggatgcccatgcctattacaactgacgccgccggtcccactcgaagatcccgacgaaagtacggtccagcaagtctgttgatgcccaattatgttgtacacccatctattattcctactcctggttaccgaggcactcgctactatcgcagccgaaacagtacctcccgccgtcgccgcaagacacctgcaaatcgcagtcgtcgccgtagacgcacaagcaaaccgactcccggcgccctggtgcggcaagtgtaccgcaatggtagtgcggaacctttgacactgccgcgtgcgcgttaccatccgagtatcatcacttaatcaatgttgccgctgcctccttgcagatatggccctcacttgtcgccttcgcgttcccatcactggttaccgaggaagaaactcgcgccgtagaagagggatgttgggacgcggaatgcgacgctacaggcgacggcgtgctatccgcaagcaattgcggggtggttttttaccagccttaattccaattatcgctgctgcaattggcgcgataccaggcatagcttccgtggcggttcaggcctcgcaacgacattgacattggaaaaaaacgtataaataaaaaaaaaaaaatacaatggactctgacactcctggtcctgtgactatgttttcttagagatggaagacatcaatttttcatccttggctccgcgacacggcacgaagccgtacatgggcacctggagcgacatcggcacgagccaactgaacgggggcgccttcaattggagcagtatctggagcgggcttaaaaattttggctcaaccataaaaacatacgggaacaaagcttggaacagcagtacaggacaggcgcttagaaataaacttaaagaccagaacttccaacaaaaagtagtcgatgggatagcttccggcatcaatggagtggtagatttggctaaccaggctgtgcagaaaaagataaacagtcgtttggacccgccgccagcaaccccaggtgaaatgcaagtggaggaagaaattcctccgccagaaaaacgaggcgacaagcgtccgcgtcccgatttggaagagacgctggtgacgcgcgtagatgaaccgccttcttatgaggaagcaacgaagcttggaatgcccaccactagaccgatagccccaatggccaccggggtgatgaaaccttctcagttgcatcgacccgtcaccttggatttgccccctccccctgctgctactgctgtacccgcttctaagcctgtcgctgccccgaaaccagtcgccgtagccaggtcacgtcccgggggcgctcctcgtccaaatgcgcactggcaaaatactctgaacagcatcgtgggtctaggcgtgcaaagtgtaaaacgccgtcgctgcttttaattaaatatggagtagcgcttaacttgcctatctgtgtatatgtgtcattacacgccgtcacagcagcagaggaaaaaaggaagaggtcgtgcgtcgacgctgagttactttcaagatggccaccccatcgatgctgccccaatgggcatacatgcacatcgccggacaggatgcttcggagtacctgagtccgggtctggtgcagttcgcccgcgccacagacacctacttcaatctgggaaataagtttagaaatcccaccgtagcgccgacccacgatgtgaccaccgaccgtagccagcggctcatgttgcgcttcgtgcccgttgaccgggaggacaatacatactcttacaaagtgcggtacaccctggccgtgggcgacaacagagtgctggatatggccagcacgttctttgacattaggggtgtgttggacagaggtcccagtttcaaaccctattctggtacggcttacaactccctggctcctaaaggcgctccaaatacatctcagtggattgcagaaggtgtaaaaaatacaactggtgaggaacacgtaacagaagaggaaaccaatactactacttacacttttggcaatgctcctgtaaaagctgaagctgaaattacaaaagaaggactcccagtaggtttggaagtttcagatgaagaaagtaaaccgatttatgctgataaaacatatcagccagaacctcagctgggagatgaaacttggactgaccttgatggaaaaaccgaaaagtatggaggcagggctctcaaacccgatactaagatgaaaccatgctacgggtcctttgccaaacctactaatgtgaaaggcggtcaggcaaaacaaaaaacaacggagcagccaaatcagaaagtcgaatatgatatcgacatggagttttttgatgcggcatcgcagaaaacaaacttaagtcctaaaattgtcatgtatgcagaaaatgtaaatttggaaactccagacactcatgtagtgtacaaacctggaacagaagacacaagttccgaagctaatttgggacaacaatctatgcccaacagacccaactacattggcttcagagataactttattggacttatgtactataacagtactggtaacatgggggtgctggctggtcaagcgtctcagttaaatgcagtggttgacttgcaggacagaaacacagaactttcttaccaactcttgcttgactctctgggcgacagaaccagatactttagcatgtggaatcaggctgtggacagttatgatcctgatgtacgtgttattgaaaatcatggtgtggaagatgaacttcccaactactgttttccactggacggcataggtgttccaacaaccagttacaaatcaatagttccaaatggagacaatgcgcctaattggaaggaacctgaagtaaatggaacaagtgagatcggacagggtaatttgtttgccatggaaattaaccttcaagccaatctatggcgaagtttcctttattccaatgtggctctatatctcccagactcgtacaaatacaccccgtccaatgtcactcttccagaaaacaaaaacacctacgactacatgaacgggcgggtggtgccgccatctctagtagacacctatgtgaacattggtgccaggtggtctctggatgccatggacaatgtcaacccattcaaccaccaccgtaacgctggcttgcgttaccgatccatgcttctgggtaacggacgttatgtgcctttccacatacaagtgcctcaaaaattcttcgctgttaaaaacctgctgcttctcccaggctcctacacttatgagtggaactttaggaaggatgtgaacatggttctacagagttccctcggtaacgacctgcgggtagatggcgccagcatcagtttcacgagcatcaacctctatgctacttttttccccatggctcacaacaccgcttccacccttgaagccatgctgcggaatgacaccaatgatcagtcattcaacgactacctatctgcagctaacatgctctaccccattcctgccaatgcaaccaatattcccatttccattccttctcgcaactgggcggctttcagaggctggtcatttaccagactgaaaaccaaagaaactccctctttggggtctggatttgacccctactttgtctattctggttctattccctacctggatggtaccttctacctgaaccacacttttaagaaggtttccatcatgtttgactcttcagtgagctggcctggaaatgacaggttactatctcctaacgaatttgaaataaagcgcactgtggatggcgaaggctacaacgtagcccaatgcaacatgaccaaagactggttcttggtacagatgctcgccaactacaacatcggctatcagggcttctacattccagaaggatacaaagatcgcatgtattcatttttcagaaacttccagcccatgagcaggcaggtggttgatgaggtcaattacaaagacttcaaggccgtcgccataccctaccaacacaacaactctggctttgtgggttacatggctccgaccatgcgccaaggtcaaccctatcccgctaactatccctatccactcattggaacaactgccgtaaatagtgttacgcagaaaaagttcttgtgtgacagaaccatgtggcgcataccgttctcgagcaacttcatgtctatgggggcccttacagacttgggacagaatatgctctatgccaactcagctcatgctctggacatgacctttgaggtggatcccatggatgagcccaccctgctttatcttctcttcgaagttttcgacgtggtcagagtgcatcagccacaccgcggcatcatcgaggcagtctacctgcgtacaccgttctcggccggtaacgctaccacgtaagaagcttcttgcttcttgcaaatagcagctgcaaccatggcctgcggatcccaaaacggctccagcgagcaagagctcagagccattgtccaagacctgggttgcggaccctattttttgggaacctacgataagcgcttcccggggttcatggcccccgataagctcgcctgtgccattgtaaatacggccggacgtgagacggggggagagcactggttggctttcggttggaacccacgttctaacacctgctacctttttgatccttttggattctcggatgatcgtctcaaacagatttaccagtttgaatatgagggtctcctgcgccgcagcgctcttgctaccaaggaccgctgtattacgctggaaaaatctacccagaccgtgcagggtccccgttctgccgcctgcggacttttctgctgcatgttccttcacgcctttgtgcactggcctgaccgtcccatggacggaaaccccaccatgaaattgctaactggagtgccaaacaacatgcttcattctcctaaagtccagcccaccctgtgtgacaatcaaaaagcactctaccattttcttaatacccattcgccttattttcgctcccatcgtacacacatcgaaagggccactgcgttcgaccgtatggatgttcaataatgactcatgtaaacaacgtgttcaataaacatcactttatttttttacatgtatcaaggctctgcattacttatttatttacaagtcgaatgggttctgacgagaatcagaatgacccgcaggcagtgatacgttgcggaactgatacttgggttgccacttgaattcgggaatcaccaacttgggaaccggtatatcgggcaggatgtcactccacagctttctggtcagctgcaaagctccaagcaggtcaggagccgaaatcttgaaatcacaattaggaccagtgctttgagcgcgagagttgcggtacaccggattgcagcactgaaacaccatcagcgacggatgtctcacgcttgccagcacggtgggatctgcaatcatgcccacatccagatcttcagcattggcaatgctgaacggggtcatcttgcaggtctgcctacccatggcgggcacccaattaggcttgtggttgcaatcgcagtgcagggggatcagtatcatcttggcctgatcctgtctgattcctggatacacggctctcatgaaagcatcatattgcttgaaagcctgctgggctttactaccctcggtataaaacatcccgcaggacctgctcgaaaactggttagctgcacagccggcatcattcacacagcagcgggcgtcattgttagctatttgcaccacacttctgccccagcggttttgggtgattttggttcgctcgggattctcctttaaggctcgttgtccgttctcgctggccacatccatctcgataatctgctccttctgaatcataatattgccatgcaggcacttcagcttgccctcataatcattgcagccatgaggccacaacgcacagcctgtacattcccaattatggtgggcgatctgagaaaaagaatgtatcattccctgcagaaatcttcccatcatcgtgctcagtgtcttgtgactagtgaaagttaactggatgcctcggtgctcctcgtttacgtactggtgacagatgcgcttgtattgttcgtgttgctcaggcattagtttaaaagaggttctaagttcgttatccagcctgtacttctccatcagcagacacatcacttccatgcctttctcccaagcagacaccaggggcaagctaatcggattcttaacagtgcaggcagcagctcctttagccagagggtcatctttagcgatcttctcaatgcttcttttgccatccttctcaacgatgcgcacgggcgggtagctgaaacccactgctacaagttgcgcctcttctctttcttcttcgctgtcttgactgatgtcttgcatggggatatgtttggtcttccttggcttctttttggggggtatcggaggaggaggactgtcgctccgttccggagacagggaggattgtgacgtttcgctcaccattaccaactgactgtcggtagaagaacctgaccccacacggcgacaggtgtttctcttcgggggcagaggtggaggcgattgcgaagggctgcggtccgacctggaaggcggatgactggcagaaccccttccgcgttcgggggtgtgctccctgtggcggtcgcttaactgatttccttcgcggctggccattgtgttctcctaggcagagaaacaacagacatggaaactcagccattgctgtcaacatcgccacgagtgccatcacatctcgtcctcagcgacgaggaaaaggagcagagcttaagcattccaccgcccagtcctgccaccacctctaccctagaagataaggaggtcgacgcatctcatgacatgcagaataaaaaagcgaaagagtctgagacagacatcgagcaagacccgggctatgtgacaccggtggaacacgaggaagagttgaaacgctttctagagagagaggatgaaaactgcccaaaacaacgagcagataactatcaccaagatgctggaaatagggatcagaacaccgactacctcatagggcttgacggggaagacgcgctccttaaacatctagcaagacagtcgctcatagtcaaggatgcattattggacagaactgaagtgcccatcagtgtggaagagctcagccgcgcctacgagcttaacctcttttcacctcgtactccccccaaacgtcagccaaacggcacctgcgagccaaatcctcgcttaaacttttatccagcttttgctgtgccagaagtactggctacctatcacatcttttttaaaaatcaaaaaattccagtctcctgccgcgctaatcgcacccgcgccgatgccctactcaatctgggacctggttcacgcttacctgatatagcttccttggaagaggttccaaagatcttcgagggtctgggcaataatgagactcgggccgcaaatgctctgcaaaagggagaaaatggcatggatgagcatcacagcgttctggtggaattggaaggcgataatgccagactcgcagtactcaagcgaagcatcgaggtcacacacttcgcatatcccgctgtcaacctgccccctaaagtcatgacggcggtcatggaccagttactcattaagcgcgcaagtcccctttcagaagacatgcatgacccagatgcctgtgatgagggtaaaccagtggtcagtgatgagcagctaacccgatggctgggcaccgactctcccagggatttggaagagcgtcgcaagcttatgatggccgtggtgctggttaccgtagaactagagtgtctccgacgtttctttaccgattcagaaaccttgcgcaaactcgaagagaatctgcactacacttttagacacggctttgtgcggcaggcatgcaagatatctaacgtggaactcaccaacctggtttcctacatgggtattctgcatgagaatcgcctaggacaaagcgtgctgcacagcaccctgaagggggaagcccgccgtgattacatccgcgattgtgtctatctgtacctgtgccacacgtggcaaaccggcatgggtgtatggcagcaatgtttagaagaacagaacttgaaagagcttgacaagctcttacagaaatctcttaaggttctgtggacagggttcgacgagcgcaccgtcgcttccgacctggcagacctcatcttcccagagcgtctcagggttactttgcgaaacggattgcctgactttatgagccagagcatgcttaacaattttcgctctttcatcctggaacgctccggtatcctgcccgccacctgctgcgcactgccctccgactttgtgcctctcacctaccgcgagtgccccccgccgctatggagtcactgctacctgttccgtctggccaactatctctcctaccactcggatgtgatcgaggatgtgagcggagacggcttgctggagtgtcactgccgctgcaatctgtgcacgccccaccggtccctagcttgcaacccccagttgatgagcgaaacccagataataggcacctttgaattgcaaggccccagcagccaaggcgatgggtcttctcctgggcaaagtttaaaactgaccccgggactgtggacctccgcctacttgcgcaagtttgctccggaagattaccacccctatgaaatcaagttctatgaggaccaatcacagcctccaaaggccgaactttcggcctgcgtcatcacccagggggcaattctggcccaattgcaagccatccaaaaatcccgccaagaatttctactgaaaaagggtaagggggtctaccttgacccccagaccggcgaggaactcaacacaaggttccctcaggatgtcccaacgacgagaaaacaagaagttgaaggtgcagccgccgcccccagaagatatggaggaagattgggacagtcaggcagaggaggcggaggaggacagtctggaggacagtctggaggaagacagtttggaggaggaaaacgaggaggcagaggaggtggaagaagtaaccgccgacaaacagttatcctcggctgcggagacaagcaacagcgctaccatctccgctccgagtcgaggaacccggcggcgtcccagcagtagatgggacgagaccggacgcttcccgaacccaaccagcgcttccaagaccggtaagaaggatcggcagggatacaagtcctggcgggggcataagaatgccatcatctcctgcttgcatgagtgcgggggcaacatatccttcacgcggcgctacttgctattccaccatggggtgaactttccgcgcaatgttttgcattactaccgtcacctccacagcccctactatagccagcaaatcccggcagtctcgacagataaagacagcggcggcgacctccaacagaaaaccagcagcggcagttagaaaatacacaacaagtgcagcaacaggaggattaaagattacagccaacgagccagcgcaaacccgagagttaagaaatcggatctttccaaccctgtatgccatcttccagcagagtcggggtcaagagcaggaactgaaaataaaaaaccgatctctgcgttcgctcaccagaagttgtttgtatcacaagagcgaagatcaacttcagcgcactctcgaggacgccgaggctctcttcaacaagtactgcgcgctgactcttaaagagtaggcagcgaccgcgcttattcaaaaaaggcgggaattacatcatcctcgacatgagtaaagaaattcccacgccttacatgtggagttatcaaccccaaatgggattggcggcaggcgcctcccaggactactccacccgcatgaattggctcagcgccgggccttctatgatttctcgagttaatgatatacgcgcctaccgaaaccaaatacttttggaacagtcagctcttaccaccacgccccgccaacaccttaatcccagaaattggcccgccgccctagtgtaccaggaaagtcccgctcccaccactgtattacttcctcgagacgcccaggccgaagtccaaatgactaatgcaggtgcgcagttagctggcggctccaccctatgtcgtcacaggcctcggcataatataaaacgcctgatgatcagaggccgaggtatccagctcaacgacgagtcggtgagctctccgcttggtctacgaccagacggaatctttcagattgccggctgcgggagatcttccttcacccctcgtcaggctgttctgactttggaaagttcgtcttcgcaaccccgctcgggcggaatcgggaccgttcaatttgtggaggagtttactccctctgtctacttcaaccccttctccggatctcctgggcattacccggacgagttcataccgaacttcgacgcgattagcgagtcagtggacggctacgattgatgtctggtgacgcggctgagctatctcggctgcgacatctagaccactgccgccgctttcgctgctttgcccgggaactcattgagttcatctacttcgaactccccaaggatcaccctcaaggtccggcccacggagtgcggatttctatcgaaggcaaaatagactctcgcctgcaacgaattttctcccagcggcccgtgctgatcgagcgagaccagggaaacaccacggtttccatctactgcatttgtaatcaccccggattgcatgaaagcctttgctgtcttatgtgtactgagtttaataaaaactgaattaagactctcctacggactgccgcttcttcaacccggattttacaaccagaagaacgaaacttttcctgtcgtccaggactctgttaacttcacctttcctactcacaaactagaagctcaacgactacaccgcttttccagaagcattttccctactaatactactttcaaaaccggaggtgagctccaaggtcttcctacagaaaacccttgggtggaagcgggccttgtagtgctaggaattcttgcgggtgggcttgtgattattctttgctacctatacacaccttgcttcactttcttagtggtgttgtggtattggtttaaaaaatggggcccatactagtcttgcttgttttactttcgcttttggaaccgggttctgccaattacgatccatgtctagacttcgacccagaaaactgcacacttacttttgcacccgacacaagccgcatctgtggagttcatcgcctctcttacgaacttggcccccaacgacaaaaatttacctgcatggtgggaatcaaccccatagttatcacccagcaaagtggagatactaagggttgcattcactgctcctgcgattccatcgagtgcacctacaccctgctgaagaccctatgcggcctaagagacctgctaccaatgaattaaaaaatgattaataaaaaatcacttacttgaaatcagcaataaggtctctgttgaaattttctcccagcagcacctcacttccctcttcccaactctggtattctaaaccccgttcagcggcatactttctccatactttaaaggggatgtcaaattttagctcctctcctgtacccacaatcttcatgtctttcttcccagatgaccaagagagtccggctcagtgactccttcaaccctgtctacccctatgaagatgaaagcacctcccaacacccctttataaacccagggtttatttccccaaatggcttcacacaaagcccaaacggagttcttactttaaaatgtttaaccccactaacaaccacaggcggatctctacagctaaaagtgggagggggacttacagtggatgacaccaacggttttttgaaagaaaacataagtgccaccacaccactcgttaagactggtcactctataggtttaccactaggagccggattgggaacgaatgaaaataaactttgtatcaaattaggacaaggacttacattcaattcaaacaacatttgcattgatgacaatattaacaccttatggacaggagtcaaccccaccgaagccaactgtcaaatcatgaactccagtgaatctaatgattgcaaattaattctaacactagttaaaactggagcactagtcactgcatttgtttatgttataggagtatctaacaattttaatatgctaactacacacagaaatataaattttactgcagagctgtttttcgattctactggtaatttactaactagactctcatccctcaaaactccacttaatcataaatcaggacaaaacatggctactggtgccattactaatgctaaaggtttcatgcccagcacgactgcctatcctttcaatgataattctagagaaaaagaaaactacatttacggaacttgttactacacagctagtgatcgcactgcttttcccattgacatatctgtcatgcttaaccgaagagcaataaatgacgagacatcatattgtattcgtataacttggtcctggaacacaggagatgccccagaggtgcaaacctctgctacaaccctagtcacctccccatttaccttttactacatcagagaagacgactgacaaataaagtttgcgatcgccaggcccaccatggccccgcggcgggcgcgcggctgccggaccctcggtctcccggcgctgctactgctgctgctgctccggccgccggcgacgcggggcatcacgtgccctccccccatgtccgtggaacacgcagacatctgggtcaagagctacagcttgtactccagggagcggtacatttgtaactctggtttcaagcgtaaagccggcacgtccagcctgacggagtgcgtgttgaacaaggccacgaatgtcgcccactggacaacccccagtctcaaatgcattagagacggaagcggagctactaacttcagcctgctgaagcaggctggagacgtggaggagaaccctggacctgactggacctggcgcatcctgttcttggtggcagctgctacgggagctcattccaactgggtgaatgtaataagtgatttgaaaaaaattgaagatcttattcaatctatgcatattgatgctactttatatacggaaagtgatgttcaccccagttgcaaagtaacagcaatgaagtgctttctcttggagttacaagttatttcacttgagtccggagatgcaagtattcatgatacagtagaaaatctgatcatcctagcaaacaacagtttgtcttctaatgggaatgtaacagaatctggatgcaaagaatgtgaggaactggaggaaaaaaatattaaagaatttttgcagagttttgtacatattgtccaaatgttcatcaacacttcttaagctagcttgactgactgagatacagcgtaccttcagctcacagacatgataagatacattgatgagtttggacaaaccacaactagaatgcagtgaaaaaaatgctttatttgtgaaatttgtgatgctattgctttatttgtaaccattataagctgcaataaacaagttaacaacaacaattgcattcattttatgtttcaggttcagggggaggtgtgggaggttttttaaagcaagtaaaacctctacaaatgtggtagtcgtcagctatcctgcaggaacttgtttatttgaaaatcaattcacaaaatccgagtagttattttgcctcccccttcccatttaacagaatacaccaatctctccccacgcacagctttaaacatttggataccattagatatagacatggttttagattccacattccaaacagtttcagagcgagccaatctggggtcagtgatagataaaaatccatcgggatagtcttttaaagcgctttcacagtccaactgctgcggatgcgactccggagtctggatcacggtcatctggaagaagaacgatgggaatcataatccgaaaacggtatcggacgattgtgtctcatcaaacccacaagcagccgctgtctgcgtcgctccgtgcgactgctgtttatgggatcagggtccacagtgtcctgaagcatgattttaatagcccttaacatcaactttctggtgcgatgcgcgcagcaacgcattctgatttcactcaaatctttgcagtaggtacaacacattattacaatattgtttaataaaccataattaaaagcgctccagccaaaactcatatctgatataatcgcccctgcatgaccatcataccaaagtttaatataaattaaatgacgttccctcaaaaacacactacccacatacatgatctcttttggcatgtgcatattaacaatctgtctgtaccatggacaacgttggttaatcatgcaacccaatataaccttccggaaccacactgccaacaccgctcccccagccatgcattgaagtgaaccctgctgattacaatgacaatgaagaacccaattctctcgaccgtgaatcacttgagaatgaaaaatatctatagtggcacaacatagacataaatgcatgcatcttctcataatttttaactcctcaggatttagaaacatatcccagggaataggaagctcttgcagaacagtaaagctggcagaacaaggaagaccacgaacacaacttacactatgcatagtcatagtatcacaatctggcaacagcgggtggtcttcagtcatagaagctcgggtttcattttcctcacaacgtggtaactgggctctggtgtaagggtgatgtctggcgcatgatgtcgagcgtgcgcgcaaccttgtcataatggagttgcttcctgacattctcgtattttgtatagcaaaacgcggccctggcagaacacactcttcttcgccttctatcctgccgcttagcgtgttccgtgtgatagttcaagtacaaccacactcttaagttggtcaaaagaatgctggcttcagttgtaatcaaaactccatcgcatctaatcgttctgaggaaatcatccaagcaatgcaactggattgtgtttcaagcaggagaggagagggaagagacggaagaaccatgttaatttttattccaaacgatctcgcagtacttcaaattgtagatcgcgcagatggcatctctcgcccccactgtgttggtgaaaaagcacagctagatcaaaagaaatgcgattttcaaggtgctcaacggtggcttccagcaaagcctccacgcgcacatccaagaacaaaagaataccaaaagaaggagcattttctaactcctcaatcatcatattacattcctgcaccattcccagataattttcagctttccagccttgaattattcgtgtcagttcttgtggtaaatccaatccacacattacaaacaggtcccggagggcgccctccaccaccattcttaaacacaccctcataatgacaaaatatcttgctcctgtgtcacctgtagcgaattgagaatggcaacatcaattgacatgcccttggctctaagttcttctttaagttctagttgtaaaaactctctcatattatcaccaaactgcttagccagaagccccccgggaacaagagcaggggacgctacagtgcagtacaagcgcagacctccccaattggctccagcaaaaacaagattggaataagcatattgggaaccgccagtaatatcatcgaagttgctggaaatataatcaggcagagtttcttgtaaaaattgaataaaagaaaaatttgccaaaaaaacattcaaaacctctgggatgcaaatgcaataggttaccgcgctgcgctccaacattgttagttttgaattagtctgcaaaaataaaaaaaaaaacaagcgtcatatcatagtagcctgacgaacagatggataaatcagtctttccatcacaagacaagccacagggtctccagctcgaccctcgtaaaacctgtcatcatgattaaacaacagcaccgaaagttcctcgcggtgaccagcatgaataattcttgatgaagcatacaatccagacatgttagcatcagttaacgagaaaaaacagccaacatagcctttgggtataattatgcttaatcgtaagtatagcaaagccacccctcgcggatacaaagtaaaaggcacaggagaataaaaaatataattatttctctgctgctgttcaggcaacgtcgcccccggtccctctaaatacacatacaaagcctcatcagccatggcttaccagacaaagtacagcgggcacacaaagcacaagctctaaagtgactctccaacctctccacaatatatatatacacaagccctaaactgacgtaatgggagtaaagtgtaaaaaatcccgccaaacccaacacacaccccgaaactgcgtcaccagggaaaagtacagtttcacttccgcaatcccaacaggcgtaacttcctctttctcacggtacgtgatatcccactaacttgcaacgtcattttcccacggtcgcaccgccccttttagccgttaaccccacagccaatcaccacacgatccacactttttaaaatcacctcatttacatattggcaccattccatctataaggtatattatatagataga

SEQ ID NO: 212 - DNA, 35332 bp, Artificial Sequence
  Genome sequence of NG-774 virus
tctatctatataatataccttatagatggaatggtgccaatatgtaaatgaggtgattttaaaaagtgtggatcgtgtggtgattggctgtggggttaacggctaaaaggggcggtgcgaccgtgggaaaatgacgttttgtgggggtggagtttttttgcaagttgtcgcgggaaatgtgacgcataaaaaggcttttttctcacggaactacttagttttcccacggtatttaacaggaaatgaggtagttttgaccggatgcaagtgaaaattgttgattttcgcgcgaaaactgaatgaggaagtgtttttctgaataatgtggtatttatggcagggtggagtatttgttcagggccaggtagactttgacccattacgtggaggtttcgattaccgtgttttttacctgaatttccgcgtaccgtgtcaaagtcttctgtttttacgtaggtgtcagctgatcgctagggtatttatacctcagggtttgtgtcaagaggccactcttgagtgccagcgagaagagttttctcctctgcgccggcagtttaataataaaaaaatgagagatttgcgatttctgcctcaggaaataatctctgctgagactggaaatgaaatattggagcttgtggtgcacgccctgatgggagacgatccggagccacctgtgcagctttttgagcctcctacgcttcaggaactgtatgatttagaggtagagggatcggaggattctaatgaggaagctgtaaatggcttttttaccgattctatgcttttagctgctaatgaagggttagaattagatccgcctttggacacttttgatactccaggggtaattgtggaaagcggtacaggtgtaagaaaattacctgatttgagttccgtggactgtgatttgcactgctatgaagacgggtttcctccgagtgatgaggaggaccatgaaaaggagcagtccatgcagactgcagcgggtgagggagtgaaggctgccaatgttggttttcagttggattgcccggagcttcctggacatggctgtaagtcttgtgaatttcacaggaaaaatactggagtaaaggaactgttatgttcgctttgttatatgagaacgcactgccactttatttacagtaagtgtgtttaagttaaaatttaaaggaatatgctgtttttcacatgtatattgagtgtgagttttgtgcttcttattataggtcctgtgtctgatgctgatgaatcaccatctcctgattctactacctcacctcctgagattcaagcacctgttcctgtggacgtgcgcaagcccattcctgtgaagcttaagcctgggaaacgtccagcagtggaaaaacttgaggacttgttacagggtggggacggacctttggacttgagtacacggaaacgtccaagacaataagtgttccatatccgtgtttacttaaggtgacgtcaatatttgtgtgacagtgcaatgtaataaaaatatgttaactgttcactggtttttattgctttttgggcggggactcaggtatataagtagaagcagacctgtgtggttagctcataggagctggctttcatccatggaggtttgggccattttggaagaccttaggaagactaggcaactgttagagaacgcttcggacggagtctccggtttttggagattctggttcgctagtgaattagctagggtagtttttaggataaaacaggactataaacaagaatttgaaaagttgttggtagattgcccaggactttttgaagctcttaatttgggccatcaggttcactttaaagaaaaagttttatcagttttagacttttcaaccccaggtagaactgctgctgctgtggcttttcttacttttatattagataaatggatcccgcagactcatttcagcaggggatacgttttggatttcatagccacagcattgtggagaacatggaaggttcgcaagatgaggacaatcttaggttactggccagtgcagcctttgggtgtagcgggaatcctgaggcatccaccggtcatgccagcggttctggaggaggaacagcaagaggacaacccgagagccggcctggaccctccagtggaggaggcggagtagctgacttgtctcctgaactgcaacgggtgcttactggatctacgtccactggacgggataggggcgttaagagggagagggcatctagtggtactgatgctagatctgagttggctttaagtttaatgagtcgcagacgtcctgaaaccatttggtggcatgaggttcagaaagagggaagggatgaagtttctgtattgcaggagaaatattcactggaacaggtgaaaacatgttggttggagcctgaggatgattgggaggtggccattaaaaattatgccaagatagctttgaggcctgataaacagtataagattactagacggattaatatccggaatgcttgttacatatctggaaatggggctgaggtggtaatagatactcaagacaaggcagttattagatgctgcatgatggatatgtggcctggggtagtcggtatggaagcagtaacttttgtaaatgttaagtttaggggagatggttataatggaatagtgtttatggccaataccaaacttatattgcatggttgtagcttttttggtttcaacaatacctgtgtagatgcctggggacaggttagtgtacggggatgtagtttctatgcgtgttggattgccacagctggcagaaccaagagtcaattgtctctgaagaaatgcatatttcaaagatgtaacctgggcattctgaatgaaggcgaagcaagggtccgccactgcgcttctacagatactggatgttttattttgattaagggaaatgccagcgtaaagcataacatgatttgcggtgcttccgatgagaggccttatcaaatgctcacttgtgctggtgggcattgtaatatgctggctactgtgcatattgtttcccatcaacgcaaaaaatggcctgtttttgatcacaatgtgatgacgaagtgtaccatgcatgcaggtgggcgtagaggaatgtttatgccttaccagtgtaacatgaatcatgtgaaagtgttgttggaaccagatgccttttccagaatgagcctaacaggaatttttgacatgaacatgcaaatctggaagatcctgaggtatgatgatacgagatcgagggtacgcgcatgcgaatgcggaggcaagcatgccaggttccagccggtgtgtgtagatgtgactgaagatctcagaccggatcatttggttattgcccgcactggagcagagttcggatccagtggagaagaaactgactaaggtgagtattgggaaaactttggggtgggattttcagatggacagattgagtaaaaatttgttttttctgtcttgcagctgtcatgagtggaaacgcttcttttaaggggggagtcttcagcccttatctgacagggcgtctcccatcctgggcaggagttcgtcagaatgttatgggatctactgtggatggaagacccgtccaacccgccaattcttcaacgctgacctatgctactttaagttcttcacctttggacgcagctgcagctgccgccgccgcttctgttgccgctaacactgtgcttggaatgggttactatggaagcatcatggctaattccacttcctctaataacccttctaccctgactcaggacaagttacttgtccttttggcccagctggaggctttgacccaacgtctgggtgaactttctcagcaggtggtcgagttgcgagtacaaactgagtctgctgtcggcacggcaaagtctaaataaaaaaatcccagaatcaatgaataaataaacaagcttgttgttgatttaaaatcaagtgtttttatttcatttttcgcgcacggtatgccctagaccaccgatctctatcattgagaactcggtggattttttccaggatcctatagaggtgggattgaatgtttagatacatgggcattaggccgtctttggggtggagatagctccattgaagggattcatgctccggggtagtgttgtaaatcacccagtcataacaaggtcgcagtgcatggtgttgcacaatatcttttagaagtaggctgattgccacagataagcccttggtgtaggtgtttacaaaccggttgagctgggatgggtgcattcggggtgaaattatgtgcattttggattggatttttaagttggcaatattgccgccaagatcccgtcttgggttcatgttatgaaggaccaccaagacggtgtatccggtacatttaggaaatttatcgtgcagcttggatggaaaagcgtggaaaaatttggagacacccttgtgtcctccaagattttccatgcactcatccatgataatagcaatggggccgtgggcagcggcgcgggcaaacacgttccgtgggtctgacacatcatagttatgttcctgagttaaatcatcataagccattttaatgaatttggggcggagagtaccagattggggtatgaatgttccttcgggccccggagcatagttcccctcacagatttgcatttcccaagctttcagttccgagggtggaatcatgtccacctggggggctatgaaaaacaccgtttctggggcgggggtgattaattgtgatgatagcaaatttctgagcaattgagatttgccacatccggtggggccataaatgattccgattacgggttgcaggtggtagtttagggaacggcaactgccgtcttctcgaagcaagggggccacctcgttcatcatttcccttacatgcatattttcccgcaccaaatccattaggaggcgctctcctcctagtgatagaagttcttgtagtgaggaaaagtttttcagcggtttcagaccgtcagccatgggcattttggagagagtttgctgcaaaagttctagtctgttccacagttcagtgatgtgttctatggcatctcgatccagcagacctcctcgtttcgcgggtttggacggctcctggaatagggtatgagacgatgggcgtccagcgctgccagggttcggtccttccagggtctcagtgttcgagtcagggttgtttccgtcacagtgaaggggtgtgcgcctgcttgggcgcttgccagggtgcgcttcagactcatcctgctggtcgaaaacttctgtcgcttggcgccctgtatgtcggccaagtagcagtttaccatgagttcgtagttgagcgcctcggctgcgtggcctttggcgcggagcttacctttggaagttttcttgcataccgggcagtataggcatttcagcgcatacaacttgggcgcaaggaaaacggattctggggagtatgcatctgcgccgcaggaggcgcaaacagtttcacattccaccagccaggttaaatccggttcattggggtcaaaaacaagttttccgccatattttttgatgcgtttcttacctttggtctccatgagttcgtgtcctcgttgagtgacaaacaggctgtccgtgtccccgtagactgattttacaggcctcttctccagtggagtgcctcggtcttcttcgtacaggaactctgaccactctgatacaaaggcgcgcgtccaggccagcacaaaggaggctatgtgggaggggtagcgatcgttgtcaaccagggggtccaccttttccaaagtatgcaaacacatgtcaccctcttcaacatccaggaatgtgattggcttgtaggtgtatttcacgtgacctggggtccccgctgggggggtataaaagggggcggttctttgctcttcctcactgtcttccggatcgctgtccaggaacgtcagctgttggggtaggtattccctctcgaaggcgggcatgacctctgcactcaggttgtcagtttctaagaacgaggaggatttgatattgacagtgccggttgagatgcctttcatgaggttttcgtccatctggtcagaaaacacaatttttttattgtcaagtttggtggcaaatgatccatacagggcgttggataaaagtttggcaatggatcgcatggtttggttcttttccttgtccgcgcgctctttggcggcgatgttgagttggacatactcgcgtgccaggcacttccattcggggaagatagttgttaattcatctggcacgattctcacttgccaccctcgattatgcaaggtaattaaatccacactggtggccacctcgcctcgaaggggttcattggtccaacagagcctacctcctttcctagaacagaaagggggaagtgggtctagcataagttcatcgggagggtctgcatccatggtaaagattcccggaagtaaatccttatcaaaatagctgatgggagtggggtcatctaaggccatttgccattctcgagctgccagtgcgcgctcatatgggttaaggggactgccccatggcatgggatgggtgagtgcagaggcatacatgccacagatgtcatagacgtagatgggatcctcaaagatgcctatgtaggttggatagcatcgcccccctctgatacttgctcgcacatagtcatatagttcatgtgatggcgctagcagccccggacccaagttggtgcgattgggtttttctgttctgtagacgatctggcgaaagatggcgtgagaattggaagagatggtgggtctttgaaaaatgttgaaatgggcatgaggtagacctacagagtctctgacaaagtgggcataagattcttgaagcttggttaccagttcggcggtgacaagtacgtctagggcgcagtagtcaagtgtttcttgaatgatgtcataacctggttggtttttcttttcccacagttcgcggttgagaaggtattcttcgcgatccttccagtactcttctagcggaaacccgtctttgtctgcacggtaagatcctagcatgtagaactgattaactgccttgtaagggcagcagcccttctctacgggtagagagtatgcttgagcagcttttcgtagcgaagcgtgagtaagggcaaaggtgtctctgaccatgactttgaggaattggtatttgaagtcgatgtcgtcacaggctccctgttcccagagttggaagtctacccgtttcttgtaggcggggttgggcaaagcgaaagtaacatcattgaagagaatcttgccggccctgggcatgaaattgcgagtgatgcgaaaaggctgtggtacttccgctcggttattgataacctgggcagctaggacgatctcgtcgaaaccgttgatgttgtgtcctacgatgtataattctatgaaacgcggcgtgcctctgacgtgaggtagcttactgagctcatcaaaggttaggtctgtggggtcagataaggcgtagtgttcgagagcccattcgtgcaggtgaggattcgctttaaggaaggaggaccagaggtccactgccagtgctgtttgtaactggtcccggtactgacgaaaatgccgtccgactgccattttttctggggtgacgcaatagaaggtttgggggtcctgccgccagcgatcccacttgagttttatggcgaggtcataggcgatgttgacgagccgctggtctccagagagtttcatgaccagcatgaaggggattagctgcttgccaaaggaccccatccaggtgtaggtttccacatcgtaggtgagaaagagcctttctgtgcgaggatgagagccaatcgggaagaactggatctcctgccaccagttggaggaatggctgttgatgtgatggaagtagaactccctgcgacgcgccgagcattcatgcttgtgcttgtacagacggccgcagtagtcgcagcgttgcacgggttgtatctcgtgaatgagttgtacctggcttcccttgacgagaaatttcagtgggaagccgaggcctggcgattgtatctcgtgctttactatgttgtctgcatcggcctgttcatcttctgtctcgatggtggtcatgctgacgagccctcgcgggaggcaagtccagacctcggcgcggcaggggcggagctcgaggacgagagcgcgcaggctggagctgtccagggtcctgagacgctgcggactcaggttagtaggcagtgtcaggagattaacttgcatgatcttttggagggcgtgcgggaggttcagatagtacttgatctcaacgggtccgttggtggagatgtcgatggcttgcagggttccgtgtcccttgggcgctaccaccgtgcccttgtttttcattttggacggcggtggctctgttgcttcttgcatgtttagaagcggtgtcgagggcgcgcaccgggcggcaggggcggctcgggacccggcggcatggctggcagtggtacgtcggcgccgcgcgcgggtaggttctggtactgcgccctgagaagactcgcatgcgcgacgacgcggcggttgacatcctggatctgacgcctctgggtgaaagctaccggccccgtgagcttgaacctgaaagagagttcaacagaatcaatctcggtatcgttgacggcggcttgcctaaggatttcttgcacgtcaccagagttgtcctggtaggcgatctccgccatgaactgctcgatctcttcctcttgaagatctccgcggcccgctctctcgacggtggccgcgaggtcgttggagatgcgcccaatgagttgagagaatgcattcatgcccgcctcgttccagacgcggctgtagaccacggcccccacgggatctctcgcgcgcatgaccacctgggcgaggttgagctccacgtggcgggtgaagaccgcatagttgcataggcgctggaaaaggtagttgagtgtggtggcgatgtgctcggtgacgaagaaatacatgatccatcgtctcagcggcatctcgctgacatcgcccagagcttccaagcgctccatggcctcgtagaagtccacggcaaaattaaaaaactgggagtttcgcgcggacacggtcaactcctcttccagaagacggataagttcggcgatggtggtgcgcacctcgcgctcgaaagcccctgggatttcttcctcaatctcttcttcttccactaacatctcttcctcttcaggtggggctgcaggaggagggggaacgcggcgacgccggcggcgcacgggcagacggtcgatgaatctttcaatgacctctccgcggcggcggcgcatggtttcagtgacggcgcggccgttctcgcgcggtcgcagagtaaaaacaccgccgcgcatctccttaaagtggtgactgggaggttctccgtttgggagggagagggcgctgattatacattttattaattggcccgtagggactgcacgcagagatctgatcgtgtcaagatccacgggatctgaaaacctttcgacgaaagcgtctaaccagtcacagtcacaaggtaggctgagtacggcttcttgtgggcgggggtggttatgtgttcggtctgggtcttctgtttcttcttcatctcgggaaggtgagacgatgctgctggtgatgaaattaaagtaggcagttctaagacggcggatggtggcgaggagcaccaggtctttgggtccggcttgctggatacgcaggcgattggccattccccaagcattatcctgacatctagcaagatctttgtagtagtcttgcatgagccgttctacgggcacttcttcctcacccgttctgccatgcatacgtgtgagtccaaatccgcgcattggttgtaccagtgccaagtcagctacgactctttcggcgaggatggcttgctgtacttgggtaagggtggcttgaaagtcatcaaaatccacaaagcggtggtaagctcctgtattaatggtgtaagcacagttggccatgactgaccagttaactgtctggtgaccagggcgcacgagctcggtgtatttaaggcgcgaataggcgcgggtgtcaaagatgtaatcgttgcaggtgcgcaccagatactggtaccctataagaaaatgcggcggtggttggcggtagagaggccatcgttctgtagctggagcgccaggggcgaggtcttccaacataaggcggtgatagccgtagatgtacctggacatccaggtgattcctgcggcggtagtagaagcccgaggaaactcgcgtacgcggttccaaatgttgcgtagcggcatgaagtagttcattgtaggcacggtttgaccagtgaggcgcgcgcagtcattgatgctctatagacacggagaaaatgaaagcgttcagcgactcgactccgtagcctggaggaacgtgaacgggttgggtcgcggtgtaccccggttcgagacttgtactcgagccggccggagccgcggctaacgtggtattggcactcccgtctcgacccagcctacaaaaatccaggatacggaatcgagtcgttttgctggtttccgaatggcagggaagtgagtcctattttttttttttgccgctcagatgcatcccgtgctgcgacagatgcgcccccaacaacagcccccctcgcagcagcagcagcagcaatcacaaaaggctgtccctgcaactactgcaactgccgccgtgagcggtgcgggacagcccgcctatgatctggacttggaagagggcgaaggactggcacgtctaggtgcgccttcacccgagcggcatccgcgagttcaactgaaaaaagattctcgcgaggcgtatgtgccccaacagaacctatttagagacagaagcggcgaggagccggaggagatgcgagcttcccgctttaacgcgggtcgtgagctgcgtcacggtttggaccgaagacgagtgttgcgggacgaggatttcgaagttgatgaaatgacagggatcagtcctgccagggcacacgtggctgcagccaaccttgtatcggcttacgagcagacagtaaaggaagagcgtaacttccaaaagtcttttaataatcatgtgcgaaccctgattgcccgcgaagaagttacccttggtttgatgcatttgtgggatttgatggaagctatcattcagaaccctactagcaaacctctgaccgcccagctgtttctggtggtgcaacacagcagagacaatgaggctttcagagaggcgctgctgaacatcaccgaacccgaggggagatggttgtatgatcttatcaacattctacagagtatcatagtgcaggagcggagcctgggcctggccgagaaggtggctgccatcaattactcggttttgagcttgggaaaatattacgctcgcaaaatctacaagactccatacgttcccatagacaaggaggtgaagatagatgggttctacatgcgcatgacgctcaaggtcttgaccctgagcgatgatcttggggtgtatcgcaatgacagaatgcatcgcgcggttagcgccagcaggaggcgcgagttaagcgacagggaactgatgcacagtttgcaaagagctctgactggagctggaaccgagggtgagaattacttcgacatgggagctgacttgcagtggcagcctagtcgcagggctctgagcgccgcgacggcaggatgtgagcttccttacatagaagaggcggatgaaggcgaggaggaagagggcgagtacttggaagactgatggcacaacccgtgttttttgctagatggaacagcaagcaccggatcccgcaatgcgggcggcgctgcagagccagccgtccggcattaactcctcggacgattggacccaggccatgcaacgtatcatggcgttgacgactcgcaaccccgaagcctttagacagcaaccccaggccaaccgtctatcggccatcatggaagctgtagtgccttcccgctctaatcccactcatgagaaggtcctggccatcgtgaacgcgttggtggagaacaaagctattcgtccagatgaggccggactggtatacaacgctctcttagaacgcgtggctcgctacaacagtagcaatgtgcaaaccaatttggaccgtatgataacagatgtacgcgaagccgtgtctcagcgcgaaaggttccagcgtgatgccaacctgggttcgctggtggcgttaaatgctttcttgagtactcagcctgctaatgtgccgcgtggtcaacaggattatactaactttttaagtgctttgagactgatggtatcagaagtacctcagagcgaagtgtatcagtccggtcctgattacttctttcagactagcagacagggcttgcagacggtaaatctgagccaagcttttaaaaaccttaaaggtttgtggggagtgcatgccccggtaggagaaagagcaaccgtgtctagcttgttaactccgaactcccgcctattattactgttggtagctcctttcaccgacagcggtagcatcgaccgtaattcctatttgggttacctactaaacctgtatcgcgaagccatagggcaaagtcaggtggacgagcagacctatcaagaaattacccaagtcagtcgcgctttgggacaggaagacactggcagtttggaagccactctgaacttcttgcttaccaatcggtctcaaaagatccctcctcaatatgctcttactgcggaggaggagaggatccttagatatgtgcagcagagcgtgggattgtttctgatgcaagagggggcaactccgactgcagcactggacatgacagcgcgaaatatggagcccagcatgtatgccagtaaccgacctttcattaacaaactgctggactacttgcacagagctgccgctatgaactctgattatttcaccaatgccatcttaaacccgcactggctgcccccacctggtttctacacgggcgaatatgacatgcccgaccctaatgacggatttctgtgggacgacgtggacagcgatgttttttcacctctttctgatcatcgcacgtggaaaaaggaaggcggcgatagaatgcattcttctgcatcgctgtccggggtcatgggtgctaccgcggctgagcccgagtctgcaagtccttttcctagtctacccttttctctacacagtgtacgtagcagcgaagtgggtagaataagtcgcccgagtttaatgggcgaagaggagtatctaaacgattccttgctcagaccggcaagagaaaaaaatttcccaaacaatggaatagaaagtttggtggataaaatgagtagatggaagacttatgctcaggatcacagagacgagcctgggatcatggggattacaagtagagcgagccgtagacgccagcgccatgacagacagaggggtcttgtgtgggacgatgaggattcggccgatgatagcagcgtgctggacttgggtgggagaggaaggggcaacccgtttgctcatttgcgccctcgcttgggtggtatgttgtaaaaaaaaataaaaaaaaaactcaccaaggccatggcgacgagcgtacgttcgttcttctttattatctgtgtctagtataatgaggcgagtcgtgctaggcggagcggtggtgtatccggagggtcctcctccttcgtacgagagcgtgatgcagcagcagcaggcgacggcggtgatgcaatccccactggaggctccctttgtgcctccgcgatacctggcacctacggagggcagaaacagcattcgttattcggaactggcacctcagtacgataccaccaggttgtatctggtggacaacaagtcggcggacattgcttctctgaactatcagaatgaccacagcaacttcttgaccacggtggtgcaaaacaatgactttacccctacggaagccagcacccagaccattaactttgatgaacgatcgcggtggggcggtcagctaaagaccatcatgcatactaacatgccaaacgtgaacgagtatatgtttagtaacaagttcaaagcgcgtgtgatggtgtccagaaaacctcccgacggtgctgcagttggggatacttatgatcacaagcaggatattttgaaatatgagtggttcgagtttactttgccagaaggcaacttttcagttactatgactattgatttgatgaacaatgccatcatagataattacttgaaagtgggtagacagaatggagtgcttgaaagtgacattggtgttaagttcgacaccaggaacttcaagctgggatgggatcccgaaaccaagttgatcatgcctggagtgtatacgtatgaagccttccatcctgacattgtcttactgcctggctgcggagtggattttaccgagagtcgtttgagcaaccttcttggtatcagaaaaaaacagccatttcaagagggttttaagattttgtatgaagatttagaaggtggtaatattccggccctcttggatgtagatgcctatgagaacagtaagaaagaacaaaaagccaaaatagaagctgctacagctgctgcagaagctaaggcaaacatagttgccagcgactctacaagggttgctaacgctggagaggtcagaggagacaattttgcgccaacacctgttccgactgcagaatcattattggccgatgtgtctgaaggaacggacgtgaaactcactattcaacctgtagaaaaagatagtaagaatagaagctataatgtgttggaagacaaaatcaacacagcctatcgcagttggtatctttcgtacaattatggcgatcccgaaaaaggagtgcgttcctggacattgctcaccacctcagatgtcacctgcggagcagagcaggtctactggtcgcttccagacatgatgaaggatcctgtcactttccgctccactagacaagtcagtaactaccctgtggtgggtgcagagcttatgcccgtcttctcaaagagcttctacaacgaacaagctgtgtactcccagcagctccgccagtccacctcgcttacgcacgtcttcaaccgctttcctgagaaccagattttaatccgtccgccggcgcccaccattaccaccgtcagtgaaaacgttcctgctctcacagatcacgggaccctgccgttgcgcagcagtatccggggagtccaacgtgtgaccgttactgacgccagacgccgcacctgtccctacgtgtacaaggcactgggcatagtcgcaccgcgcgtcctttcaagccgcactttctaaaaaaaaaaaaaatgtccattcttatctcgcccagtaataacaccggttggggtctgcgcgctccaagcaagatgtacggaggcgcacgcaaacgttctacccaacatcctgtccgtgttcgcggacattttcgcgctccatggggcgccctcaagggccgcactcgcgttcgaaccaccgtcgatgatgtaatcgatcaggtggttgccgacgcccgtaattatactcctactgcgcctacatctactgtggatgcagttattgacagtgtagtggctgacgctcgcaactatgctcgacgtaagagccggcgaaggcgcattgccagacgccaccgagctaccactgccatgcgagccgcaagagctctgctacgaagagctagacgcgtggggcgaagagccatgcttagggcggccagacgtgcagcttcgggcgccagcgccggcaggtcccgcaggcaagcagccgctgtcgcagcggcgactattgccgacatggcccaatcgcgaagaggcaatgtatactgggtgcgtgacgctgccaccggtcaacgtgtacccgtgcgcacccgtccccctcgcacttagaagatactgagcagtctccgatgttgtgtcccagcggcgaggatgtccaagcgcaaatacaaggaagaaatgctgcaggttatcgcacctgaagtctacggccaaccgttgaaggatgaaaaaaaaccccgcaaaatcaagcgggttaaaaaggacaaaaaagaagaggaagatggcgatgatgggctggcggagtttgtgcgcgagtttgccccacggcgacgcgtgcaatggcgtgggcgcaaagttcgacatgtgttgagacctggaacttcggtggtctttacacccggcgagcgttcaagcgctacttttaagcgttcctatgatgaggtgtacggggatgatgatattcttgagcaggcggctgaccgattaggcgagtttgcttatggcaagcgtagtagaataacttccaaggatgagacagtgtcgatacccttggatcatggaaatcccacccctagtcttaaaccggtcactttgcagcaagtgttacccgtaactccgcgaacaggtgttaaacgcgaaggtgaagatttgtatcccactatgcaactgatggtacccaaacgccagaagttggaggacgttttggagaaagtaaaagtggatccagatattcaacctgaggttaaagtgagacccattaagcaggtagcgcctggtctgggggtacaaactgtagacattaagattcccactgaaagtatggaagtgcaaactgaacccgcaaagcctactgccacctccactgaagtgcaaacggatccatggatgcccatgcctattacaactgacgccgccggtcccactcgaagatcccgacgaaagtacggtccagcaagtctgttgatgcccaattatgttgtacacccatctattattcctactcctggttaccgaggcactcgctactatcgcagccgaaacagtacctcccgccgtcgccgcaagacacctgcaaatcgcagtcgtcgccgtagacgcacaagcaaaccgactcccggcgccctggtgcggcaagtgtaccgcaatggtagtgcggaacctttgacactgccgcgtgcgcgttaccatccgagtatcatcacttaatcaatgttgccgctgcctccttgcagatatggccctcacttgtcgccttcgcgttcccatcactggttaccgaggaagaaactcgcgccgtagaagagggatgttgggacgcggaatgcgacgctacaggcgacggcgtgctatccgcaagcaattgcggggtggttttttaccagccttaattccaattatcgctgctgcaattggcgcgataccaggcatagcttccgtggcggttcaggcctcgcaacgacattgacattggaaaaaaacgtataaataaaaaaaaaaaaatacaatggactctgacactcctggtcctgtgactatgttttcttagagatggaagacatcaatttttcatccttggctccgcgacacggcacgaagccgtacatgggcacctggagcgacatcggcacgagccaactgaacgggggcgccttcaattggagcagtatctggagcgggcttaaaaattttggctcaaccataaaaacatacgggaacaaagcttggaacagcagtacaggacaggcgcttagaaataaacttaaagaccagaacttccaacaaaaagtagtcgatgggatagcttccggcatcaatggagtggtagatttggctaaccaggctgtgcagaaaaagataaacagtcgtttggacccgccgccagcaaccccaggtgaaatgcaagtggaggaagaaattcctccgccagaaaaacgaggcgacaagcgtccgcgtcccgatttggaagagacgctggtgacgcgcgtagatgaaccgccttcttatgaggaagcaacgaagcttggaatgcccaccactagaccgatagccccaatggccaccggggtgatgaaaccttctcagttgcatcgacccgtcaccttggatttgccccctccccctgctgctactgctgtacccgcttctaagcctgtcgctgccccgaaaccagtcgccgtagccaggtcacgtcccgggggcgctcctcgtccaaatgcgcactggcaaaatactctgaacagcatcgtgggtctaggcgtgcaaagtgtaaaacgccgtcgctgcttttaattaaatatggagtagcgcttaacttgcctatctgtgtatatgtgtcattacacgccgtcacagcagcagaggaaaaaaggaagaggtcgtgcgtcgacgctgagttactttcaagatggccaccccatcgatgctgccccaatgggcatacatgcacatcgccggacaggatgcttcggagtacctgagtccgggtctggtgcagttcgcccgcgccacagacacctacttcaatctgggaaataagtttagaaatcccaccgtagcgccgacccacgatgtgaccaccgaccgtagccagcggctcatgttgcgcttcgtgcccgttgaccgggaggacaatacatactcttacaaagtgcggtacaccctggccgtgggcgacaacagagtgctggatatggccagcacgttctttgacattaggggtgtgttggacagaggtcccagtttcaaaccctattctggtacggcttacaactccctggctcctaaaggcgctccaaatacatctcagtggattgcagaaggtgtaaaaaatacaactggtgaggaacacgtaacagaagaggaaaccaatactactacttacacttttggcaatgctcctgtaaaagctgaagctgaaattacaaaagaaggactcccagtaggtttggaagtttcagatgaagaaagtaaaccgatttatgctgataaaacatatcagccagaacctcagctgggagatgaaacttggactgaccttgatggaaaaaccgaaaagtatggaggcagggctctcaaacccgatactaagatgaaaccatgctacgggtcctttgccaaacctactaatgtgaaaggcggtcaggcaaaacaaaaaacaacggagcagccaaatcagaaagtcgaatatgatatcgacatggagttttttgatgcggcatcgcagaaaacaaacttaagtcctaaaattgtcatgtatgcagaaaatgtaaatttggaaactccagacactcatgtagtgtacaaacctggaacagaagacacaagttccgaagctaatttgggacaacaatctatgcccaacagacccaactacattggcttcagagataactttattggacttatgtactataacagtactggtaacatgggggtgctggctggtcaagcgtctcagttaaatgcagtggttgacttgcaggacagaaacacagaactttcttaccaactcttgcttgactctctgggcgacagaaccagatactttagcatgtggaatcaggctgtggacagttatgatcctgatgtacgtgttattgaaaatcatggtgtggaagatgaacttcccaactactgttttccactggacggcataggtgttccaacaaccagttacaaatcaatagttccaaatggagacaatgcgcctaattggaaggaacctgaagtaaatggaacaagtgagatcggacagggtaatttgtttgccatggaaattaaccttcaagccaatctatggcgaagtttcctttattccaatgtggctctatatctcccagactcgtacaaatacaccccgtccaatgtcactcttccagaaaacaaaaacacctacgactacatgaacgggcgggtggtgccgccatctctagtagacacctatgtgaacattggtgccaggtggtctctggatgccatggacaatgtcaacccattcaaccaccaccgtaacgctggcttgcgttaccgatccatgcttctgggtaacggacgttatgtgcctttccacatacaagtgcctcaaaaattcttcgctgttaaaaacctgctgcttctcccaggctcctacacttatgagtggaactttaggaaggatgtgaacatggttctacagagttccctcggtaacgacctgcgggtagatggcgccagcatcagtttcacgagcatcaacctctatgctacttttttccccatggctcacaacaccgcttccacccttgaagccatgctgcggaatgacaccaatgatcagtcattcaacgactacctatctgcagctaacatgctctaccccattcctgccaatgcaaccaatattcccatttccattccttctcgcaactgggcggctttcagaggctggtcatttaccagactgaaaaccaaagaaactccctctttggggtctggatttgacccctactttgtctattctggttctattccctacctggatggtaccttctacctgaaccacacttttaagaaggtttccatcatgtttgactcttcagtgagctggcctggaaatgacaggttactatctcctaacgaatttgaaataaagcgcactgtggatggcgaaggctacaacgtagcccaatgcaacatgaccaaagactggttcttggtacagatgctcgccaactacaacatcggctatcagggcttctacattccagaaggatacaaagatcgcatgtattcatttttcagaaacttccagcccatgagcaggcaggtggttgatgaggtcaattacaaagacttcaaggccgtcgccataccctaccaacacaacaactctggctttgtgggttacatggctccgaccatgcgccaaggtcaaccctatcccgctaactatccctatccactcattggaacaactgccgtaaatagtgttacgcagaaaaagttcttgtgtgacagaaccatgtggcgcataccgttctcgagcaacttcatgtctatgggggcccttacagacttgggacagaatatgctctatgccaactcagctcatgctctggacatgacctttgaggtggatcccatggatgagcccaccctgctttatcttctcttcgaagttttcgacgtggtcagagtgcatcagccacaccgcggcatcatcgaggcagtctacctgcgtacaccgttctcggccggtaacgctaccacgtaagaagcttcttgcttcttgcaaatagcagctgcaaccatggcctgcggatcccaaaacggctccagcgagcaagagctcagagccattgtccaagacctgggttgcggaccctattttttgggaacctacgataagcgcttcccggggttcatggcccccgataagctcgcctgtgccattgtaaatacggccggacgtgagacggggggagagcactggttggctttcggttggaacccacgttctaacacctgctacctttttgatccttttggattctcggatgatcgtctcaaacagatttaccagtttgaatatgagggtctcctgcgccgcagcgctcttgctaccaaggaccgctgtattacgctggaaaaatctacccagaccgtgcagggtccccgttctgccgcctgcggacttttctgctgcatgttccttcacgcctttgtgcactggcctgaccgtcccatggacggaaaccccaccatgaaattgctaactggagtgccaaacaacatgcttcattctcctaaagtccagcccaccctgtgtgacaatcaaaaagcactctaccattttcttaatacccattcgccttattttcgctcccatcgtacacacatcgaaagggccactgcgttcgaccgtatggatgttcaataatgactcatgtaaacaacgtgttcaataaacatcactttatttttttacatgtatcaaggctctgcattacttatttatttacaagtcgaatgggttctgacgagaatcagaatgacccgcaggcagtgatacgttgcggaactgatacttgggttgccacttgaattcgggaatcaccaacttgggaaccggtatatcgggcaggatgtcactccacagctttctggtcagctgcaaagctccaagcaggtcaggagccgaaatcttgaaatcacaattaggaccagtgctttgagcgcgagagttgcggtacaccggattgcagcactgaaacaccatcagcgacggatgtctcacgcttgccagcacggtgggatctgcaatcatgcccacatccagatcttcagcattggcaatgctgaacggggtcatcttgcaggtctgcctacccatggcgggcacccaattaggcttgtggttgcaatcgcagtgcagggggatcagtatcatcttggcctgatcctgtctgattcctggatacacggctctcatgaaagcatcatattgcttgaaagcctgctgggctttactaccctcggtataaaacatcccgcaggacctgctcgaaaactggttagctgcacagccggcatcattcacacagcagcgggcgtcattgttagctatttgcaccacacttctgccccagcggttttgggtgattttggttcgctcgggattctcctttaaggctcgttgtccgttctcgctggccacatccatctcgataatctgctccttctgaatcataatattgccatgcaggcacttcagcttgccctcataatcattgcagccatgaggccacaacgcacagcctgtacattcccaattatggtgggcgatctgagaaaaagaatgtatcattccctgcagaaatcttcccatcatcgtgctcagtgtcttgtgactagtgaaagttaactggatgcctcggtgctcctcgtttacgtactggtgacagatgcgcttgtattgttcgtgttgctcaggcattagtttaaaagaggttctaagttcgttatccagcctgtacttctccatcagcagacacatcacttccatgcctttctcccaagcagacaccaggggcaagctaatcggattcttaacagtgcaggcagcagctcctttagccagagggtcatctttagcgatcttctcaatgcttcttttgccatccttctcaacgatgcgcacgggcgggtagctgaaacccactgctacaagttgcgcctcttctctttcttcttcgctgtcttgactgatgtcttgcatggggatatgtttggtcttccttggcttctttttggggggtatcggaggaggaggactgtcgctccgttccggagacagggaggattgtgacgtttcgctcaccattaccaactgactgtcggtagaagaacctgaccccacacggcgacaggtgtttctcttcgggggcagaggtggaggcgattgcgaagggctgcggtccgacctggaaggcggatgactggcagaaccccttccgcgttcgggggtgtgctccctgtggcggtcgcttaactgatttccttcgcggctggccattgtgttctcctaggcagagaaacaacagacatggaaactcagccattgctgtcaacatcgccacgagtgccatcacatctcgtcctcagcgacgaggaaaaggagcagagcttaagcattccaccgcccagtcctgccaccacctctaccctagaagataaggaggtcgacgcatctcatgacatgcagaataaaaaagcgaaagagtctgagacagacatcgagcaagacccgggctatgtgacaccggtggaacacgaggaagagttgaaacgctttctagagagagaggatgaaaactgcccaaaacaacgagcagataactatcaccaagatgctggaaatagggatcagaacaccgactacctcatagggcttgacggggaagacgcgctccttaaacatctagcaagacagtcgctcatagtcaaggatgcattattggacagaactgaagtgcccatcagtgtggaagagctcagccgcgcctacgagcttaacctcttttcacctcgtactccccccaaacgtcagccaaacggcacctgcgagccaaatcctcgcttaaacttttatccagcttttgctgtgccagaagtactggctacctatcacatcttttttaaaaatcaaaaaattccagtctcctgccgcgctaatcgcacccgcgccgatgccctactcaatctgggacctggttcacgcttacctgatatagcttccttggaagaggttccaaagatcttcgagggtctgggcaataatgagactcgggccgcaaatgctctgcaaaagggagaaaatggcatggatgagcatcacagcgttctggtggaattggaaggcgataatgccagactcgcagtactcaagcgaagcatcgaggtcacacacttcgcatatcccgctgtcaacctgccccctaaagtcatgacggcggtcatggaccagttactcattaagcgcgcaagtcccctttcagaagacatgcatgacccagatgcctgtgatgagggtaaaccagtggtcagtgatgagcagctaacccgatggctgggcaccgactctcccagggatttggaagagcgtcgcaagcttatgatggccgtggtgctggttaccgtagaactagagtgtctccgacgtttctttaccgattcagaaaccttgcgcaaactcgaagagaatctgcactacacttttagacacggctttgtgcggcaggcatgcaagatatctaacgtggaactcaccaacctggtttcctacatgggtattctgcatgagaatcgcctaggacaaagcgtgctgcacagcaccctgaagggggaagcccgccgtgattacatccgcgattgtgtctatctgtacctgtgccacacgtggcaaaccggcatgggtgtatggcagcaatgtttagaagaacagaacttgaaagagcttgacaagctcttacagaaatctcttaaggttctgtggacagggttcgacgagcgcaccgtcgcttccgacctggcagacctcatcttcccagagcgtctcagggttactttgcgaaacggattgcctgactttatgagccagagcatgcttaacaattttcgctctttcatcctggaacgctccggtatcctgcccgccacctgctgcgcactgccctccgactttgtgcctctcacctaccgcgagtgccccccgccgctatggagtcactgctacctgttccgtctggccaactatctctcctaccactcggatgtgatcgaggatgtgagcggagacggcttgctggagtgtcactgccgctgcaatctgtgcacgccccaccggtccctagcttgcaacccccagttgatgagcgaaacccagataataggcacctttgaattgcaaggccccagcagccaaggcgatgggtcttctcctgggcaaagtttaaaactgaccccgggactgtggacctccgcctacttgcgcaagtttgctccggaagattaccacccctatgaaatcaagttctatgaggaccaatcacagcctccaaaggccgaactttcggcctgcgtcatcacccagggggcaattctggcccaattgcaagccatccaaaaatcccgccaagaatttctactgaaaaagggtaagggggtctaccttgacccccagaccggcgaggaactcaacacaaggttccctcaggatgtcccaacgacgagaaaacaagaagttgaaggtgcagccgccgcccccagaagatatggaggaagattgggacagtcaggcagaggaggcggaggaggacagtctggaggacagtctggaggaagacagtttggaggaggaaaacgaggaggcagaggaggtggaagaagtaaccgccgacaaacagttatcctcggctgcggagacaagcaacagcgctaccatctccgctccgagtcgaggaacccggcggcgtcccagcagtagatgggacgagaccggacgcttcccgaacccaaccagcgcttccaagaccggtaagaaggatcggcagggatacaagtcctggcgggggcataagaatgccatcatctcctgcttgcatgagtgcgggggcaacatatccttcacgcggcgctacttgctattccaccatggggtgaactttccgcgcaatgttttgcattactaccgtcacctccacagcccctactatagccagcaaatcccggcagtctcgacagataaagacagcggcggcgacctccaacagaaaaccagcagcggcagttagaaaatacacaacaagtgcagcaacaggaggattaaagattacagccaacgagccagcgcaaacccgagagttaagaaatcggatctttccaaccctgtatgccatcttccagcagagtcggggtcaagagcaggaactgaaaataaaaaaccgatctctgcgttcgctcaccagaagttgtttgtatcacaagagcgaagatcaacttcagcgcactctcgaggacgccgaggctctcttcaacaagtactgcgcgctgactcttaaagagtaggcagcgaccgcgcttattcaaaaaaggcgggaattacatcatcctcgacatgagtaaagaaattcccacgccttacatgtggagttatcaaccccaaatgggattggcggcaggcgcctcccaggactactccacccgcatgaattggctcagcgccgggccttctatgatttctcgagttaatgatatacgcgcctaccgaaaccaaatacttttggaacagtcagctcttaccaccacgccccgccaacaccttaatcccagaaattggcccgccgccctagtgtaccaggaaagtcccgctcccaccactgtattacttcctcgagacgcccaggccgaagtccaaatgactaatgcaggtgcgcagttagctggcggctccaccctatgtcgtcacaggcctcggcataatataaaacgcctgatgatcagaggccgaggtatccagctcaacgacgagtcggtgagctctccgcttggtctacgaccagacggaatctttcagattgccggctgcgggagatcttccttcacccctcgtcaggctgttctgactttggaaagttcgtcttcgcaaccccgctcgggcggaatcgggaccgttcaatttgtggaggagtttactccctctgtctacttcaaccccttctccggatctcctgggcattacccggacgagttcataccgaacttcgacgcgattagcgagtcagtggacggctacgattgatgtctggtgacgcggctgagctatctcggctgcgacatctagaccactgccgccgctttcgctgctttgcccgggaactcattgagttcatctacttcgaactccccaaggatcaccctcaaggtccggcccacggagtgcggatttctatcgaaggcaaaatagactctcgcctgcaacgaattttctcccagcggcccgtgctgatcgagcgagaccagggaaacaccacggtttccatctactgcatttgtaatcaccccggattgcatgaaagcctttgctgtcttatgtgtactgagtttaataaaaactgaattaagactctcctacggactgccgcttcttcaacccggattttacaaccagaagaacgaaacttttcctgtcgtccaggactctgttaacttcacctttcctactcacaaactagaagctcaacgactacaccgcttttccagaagcattttccctactaatactactttcaaaaccggaggtgagctccaaggtcttcctacagaaaacccttgggtggaagcgggccttgtagtgctaggaattcttgcgggtgggcttgtgattattctttgctacctatacacaccttgcttcactttcttagtggtgttgtggtattggtttaaaaaatggggcccatactagtcttgcttgttttactttcgcttttggaaccgggttctgccaattacgatccatgtctagacttcgacccagaaaactgcacacttacttttgcacccgacacaagccgcatctgtggagttcatcgcctctcttacgaacttggcccccaacgacaaaaatttacctgcatggtgggaatcaaccccatagttatcacccagcaaagtggagatactaagggttgcattcactgctcctgcgattccatcgagtgcacctacaccctgctgaagaccctatgcggcctaagagacctgctaccaatgaattaaaaaatgattaataaaaaatcacttacttgaaatcagcaataaggtctctgttgaaattttctcccagcagcacctcacttccctcttcccaactctggtattctaaaccccgttcagcggcatactttctccatactttaaaggggatgtcaaattttagctcctctcctgtacccacaatcttcatgtctttcttcccagatgaccaagagagtccggctcagtgactccttcaaccctgtctacccctatgaagatgaaagcacctcccaacacccctttataaacccagggtttatttccccaaatggcttcacacaaagcccaaacggagttcttactttaaaatgtttaaccccactaacaaccacaggcggatctctacagctaaaagtgggagggggacttacagtggatgacaccaacggttttttgaaagaaaacataagtgccaccacaccactcgttaagactggtcactctataggtttaccactaggagccggattgggaacgaatgaaaataaactttgtatcaaattaggacaaggacttacattcaattcaaacaacatttgcattgatgacaatattaacaccttatggacaggagtcaaccccaccgaagccaactgtcaaatcatgaactccagtgaatctaatgattgcaaattaattctaacactagttaaaactggagcactagtcactgcatttgtttatgttataggagtatctaacaattttaatatgctaactacacacagaaatataaattttactgcagagctgtttttcgattctactggtaatttactaactagactctcatccctcaaaactccacttaatcataaatcaggacaaaacatggctactggtgccattactaatgctaaaggtttcatgcccagcacgactgcctatcctttcaatgataattctagagaaaaagaaaactacatttacggaacttgttactacacagctagtgatcgcactgcttttcccattgacatatctgtcatgcttaaccgaagagcaataaatgacgagacatcatattgtattcgtataacttggtcctggaacacaggagatgccccagaggtgcaaacctctgctacaaccctagtcacctccccatttaccttttactacatcagagaagacgactgacaaataaagtttgcgatcgccaggcccaccatgccgctgctgctactgctgcccctgctgtgggcaggggccctggctaactgggtgaatgtaataagtgatttgaaaaaaattgaagatcttattcaatctatgcatattgatgctactttatatacggaaagtgatgttcaccccagttgcaaagtaacagcaatgaagtgctttctcttggagttacaagttatttcacttgagtccggagatgcaagtattcatgatacagtagaaaatctgatcatcctagcaaacaacagtttgtcttctaatgggaatgtaacagaatctggatgcaaagaatgtgaggaactggaggaaaaaaatattaaagaatttttgcagagttttgtacatattgtccaaatgttcatcaacacttctggaagcggagagggcagaggaagtctgctaacatgcggtgacgtcgaggagaatcctggacctgccttgacctttgctttactggtggccctcctggtgctcagctgcaagtcaagctgctctgtgggctgtgatctgcctcaaacccacagcctgggtagcaggaggaccttgatgctcctggcacagatgaggagaatctctcttttctcctgcttgaaggacagacatgactttggatttccccaggaggagtttggcaaccagttccaaaaggctgaaaccatccctgtcctccatgagatgatccagcagatcttcaatctcttcagcacaaaggactcatctgctgcttgggatgagaccctcctagacaaattctacactgaactctaccagcagctgaatgacctggaagcctgtgtgatacagggggtgggggtgacagagactcccctgatgaaggaggactccattctggctgtgaggaaatacttccaaagaatcactctctatctgaaagagaagaaatacagcccttgtgcctgggaggttgtcagagcagaaatcatgagatctttttctttgtcaacaaacttgcaagaaagtttaagaagtaaggaaggaagcggacagtgtactaattatgctctcttgaaattggctggagatgttgagagcaaccctggacctatgtgtcaccagcagttggtcatctcttggttttccctggtttttctggcatctcccctcgtggccatatgggaactgaagaaagatgtttatgtcgtagaattggattggtatccggatgcccctggagaaatggtggtcctcacctgtgacacccctgaagaagatggtatcacctggaccttggaccagagcagtgaggtcttaggctctggcaaaaccctgaccatccaagtcaaagagtttggagatgctggccagtacacctgtcacaaaggaggcgaggttctaagccattcgctcctgctgcttcacaaaaaggaagatggaatttggtccactgatattttaaaggaccagaaagaacccaaaaataagacctttctaagatgcgaggccaagaattattctggacgtttcacctgctggtggctgacgacaatcagtactgatttgacattcagtgtcaaaagcagcagaggctcttctgacccccaaggggtgacgtgcggagctgctacactctctgcagagagagtcagaggggacaacaaggagtatgagtactcagtggagtgccaggaggacagtgcctgcccagctgctgaggagagtctgcccattgaggtcatggtggatgccgttcacaagctcaagtatgaaaactacaccagcagcttcttcatcagggacatcatcaaacctgacccacccaagaacttgcagctgaagccattaaagaattctcggcaggtggaggtcagctgggagtaccctgacacctggagtactccacattcctacttctccctgacattctgcgttcaggtccagggcaagagcaagagagaaaagaaagatagagtcttcacggacaagacctcagccacggtcatctgccgcaaaaatgccagcattagcgtgcgggcccaggaccgctactatagctcatcttggagcgaatgggcatctgtgccctgcagtggagggggcggcagcgggggaggcggcagcggcggcgggggatcgagaaacctccccgtggccactccagacccaggaatgttcccatgccttcaccactcccaaaacctgctgagggccgtcagcaacatgctccagaaggccagacaaactctagaattttacccttgcacttctgaagagattgatcatgaagatatcacaaaagataaaaccagcacagtggaggcctgtttaccattggaattaaccaagaatgagagttgcctaaattccagagagacctctttcataactaatgggagttgcctggcctccagaaagacctcttttatgatggccctgtgccttagtagtatttatgaagacttgaagatgtaccaggtggagttcaagaccatgaatgcaaagcttctgatggatcctaagaggcagatctttctagatcaaaacatgctggcagttattgatgagctgatgcaggccctgaatttcaacagtgagactgtgccacaaaaatcctcccttgaagaaccggatttttataaaactaaaatcaagctctgcatacttcttcatgctttcagaattcgggcagtgactattgatagagtgatgagctatctgaatgcttcctaagctagcttgactgactgagatacagcgtaccttcagctcacagacatgataagatacattgatgagtttggacaaaccacaactagaatgcagtgaaaaaaatgctttatttgtgaaatttgtgatgctattgctttatttgtaaccattataagctgcaataaacaagttaacaacaacaattgcattcattttatgtttcaggttcagggggaggtgtgggaggttttttaaagcaagtaaaacctctacaaatgtggtagtcgtcagctatcctgcaggaacttgtttatttgaaaatcaattcacaaaatccgagtagttattttgcctcccccttcccatttaacagaatacaccaatctctccccacgcacagctttaaacatttggataccattagatatagacatggttttagattccacattccaaacagtttcagagcgagccaatctggggtcagtgatagataaaaatccatcgggatagtcttttaaagcgctttcacagtccaactgctgcggatgcgactccggagtctggatcacggtcatctggaagaagaacgatgggaatcataatccgaaaacggtatcggacgattgtgtctcatcaaacccacaagcagccgctgtctgcgtcgctccgtgcgactgctgtttatgggatcagggtccacagtgtcctgaagcatgattttaatagcccttaacatcaactttctggtgcgatgcgcgcagcaacgcattctgatttcactcaaatctttgcagtaggtacaacacattattacaatattgtttaataaaccataattaaaagcgctccagccaaaactcatatctgatataatcgcccctgcatgaccatcataccaaagtttaatataaattaaatgacgttccctcaaaaacacactacccacatacatgatctcttttggcatgtgcatattaacaatctgtctgtaccatggacaacgttggttaatcatgcaacccaatataaccttccggaaccacactgccaacaccgctcccccagccatgcattgaagtgaaccctgctgattacaatgacaatgaagaacccaattctctcgaccgtgaatcacttgagaatgaaaaatatctatagtggcacaacatagacataaatgcatgcatcttctcataatttttaactcctcaggatttagaaacatatcccagggaataggaagctcttgcagaacagtaaagctggcagaacaaggaagaccacgaacacaacttacactatgcatagtcatagtatcacaatctggcaacagcgggtggtcttcagtcatagaagctcgggtttcattttcctcacaacgtggtaactgggctctggtgtaagggtgatgtctggcgcatgatgtcgagcgtgcgcgcaaccttgtcataatggagttgcttcctgacattctcgtattttgtatagcaaaacgcggccctggcagaacacactcttcttcgccttctatcctgccgcttagcgtgttccgtgtgatagttcaagtacaaccacactcttaagttggtcaaaagaatgctggcttcagttgtaatcaaaactccatcgcatctaatcgttctgaggaaatcatccaagcaatgcaactggattgtgtttcaagcaggagaggagagggaagagacggaagaaccatgttaatttttattccaaacgatctcgcagtacttcaaattgtagatcgcgcagatggcatctctcgcccccactgtgttggtgaaaaagcacagctagatcaaaagaaatgcgattttcaaggtgctcaacggtggcttccagcaaagcctccacgcgcacatccaagaacaaaagaataccaaaagaaggagcattttctaactcctcaatcatcatattacattcctgcaccattcccagataattttcagctttccagccttgaattattcgtgtcagttcttgtggtaaatccaatccacacattacaaacaggtcccggagggcgccctccaccaccattcttaaacacaccctcataatgacaaaatatcttgctcctgtgtcacctgtagcgaattgagaatggcaacatcaattgacatgcccttggctctaagttcttctttaagttctagttgtaaaaactctctcatattatcaccaaactgcttagccagaagccccccgggaacaagagcaggggacgctacagtgcagtacaagcgcagacctccccaattggctccagcaaaaacaagattggaataagcatattgggaaccgccagtaatatcatcgaagttgctggaaatataatcaggcagagtttcttgtaaaaattgaataaaagaaaaatttgccaaaaaaacattcaaaacctctgggatgcaaatgcaataggttaccgcgctgcgctccaacattgttagttttgaattagtctgcaaaaataaaaaaaaaaacaagcgtcatatcatagtagcctgacgaacagatggataaatcagtctttccatcacaagacaagccacagggtctccagctcgaccctcgtaaaacctgtcatcatgattaaacaacagcaccgaaagttcctcgcggtgaccagcatgaataattcttgatgaagcatacaatccagacatgttagcatcagttaacgagaaaaaacagccaacatagcctttgggtataattatgcttaatcgtaagtatagcaaagccacccctcgcggatacaaagtaaaaggcacaggagaataaaaaatataattatttctctgctgctgttcaggcaacgtcgcccccggtccctctaaatacacatacaaagcctcatcagccatggcttaccagacaaagtacagcgggcacacaaagcacaagctctaaagtgactctccaacctctccacaatatatatatacacaagccctaaactgacgtaatgggagtaaagtgtaaaaaatcccgccaaacccaacacacaccccgaaactgcgtcaccagggaaaagtacagtttcacttccgcaatcccaacaggcgtaacttcctctttctcacggtacgtgatatcccactaacttgcaacgtcattttcccacggtcgcaccgccccttttagccgttaaccccacagccaatcaccacacgatccacactttttaaaatcacctcatttacatattggcaccattccatctataaggtatattatatagataga

SEQ ID NO: 213 - DNA, 35335 bp, Artificial Sequence
  Genome sequence of NG-775 virus
tctatctatataatataccttatagatggaatggtgccaatatgtaaatgaggtgattttaaaaagtgtggatcgtgtggtgattggctgtggggttaacggctaaaaggggcggtgcgaccgtgggaaaatgacgttttgtgggggtggagtttttttgcaagttgtcgcgggaaatgtgacgcataaaaaggcttttttctcacggaactacttagttttcccacggtatttaacaggaaatgaggtagttttgaccggatgcaagtgaaaattgttgattttcgcgcgaaaactgaatgaggaagtgtttttctgaataatgtggtatttatggcagggtggagtatttgttcagggccaggtagactttgacccattacgtggaggtttcgattaccgtgttttttacctgaatttccgcgtaccgtgtcaaagtcttctgtttttacgtaggtgtcagctgatcgctagggtatttatacctcagggtttgtgtcaagaggccactcttgagtgccagcgagaagagttttctcctctgcgccggcagtttaataataaaaaaatgagagatttgcgatttctgcctcaggaaataatctctgctgagactggaaatgaaatattggagcttgtggtgcacgccctgatgggagacgatccggagccacctgtgcagctttttgagcctcctacgcttcaggaactgtatgatttagaggtagagggatcggaggattctaatgaggaagctgtaaatggcttttttaccgattctatgcttttagctgctaatgaagggttagaattagatccgcctttggacacttttgatactccaggggtaattgtggaaagcggtacaggtgtaagaaaattacctgatttgagttccgtggactgtgatttgcactgctatgaagacgggtttcctccgagtgatgaggaggaccatgaaaaggagcagtccatgcagactgcagcgggtgagggagtgaaggctgccaatgttggttttcagttggattgcccggagcttcctggacatggctgtaagtcttgtgaatttcacaggaaaaatactggagtaaaggaactgttatgttcgctttgttatatgagaacgcactgccactttatttacagtaagtgtgtttaagttaaaatttaaaggaatatgctgtttttcacatgtatattgagtgtgagttttgtgcttcttattataggtcctgtgtctgatgctgatgaatcaccatctcctgattctactacctcacctcctgagattcaagcacctgttcctgtggacgtgcgcaagcccattcctgtgaagcttaagcctgggaaacgtccagcagtggaaaaacttgaggacttgttacagggtggggacggacctttggacttgagtacacggaaacgtccaagacaataagtgttccatatccgtgtttacttaaggtgacgtcaatatttgtgtgacagtgcaatgtaataaaaatatgttaactgttcactggtttttattgctttttgggcggggactcaggtatataagtagaagcagacctgtgtggttagctcataggagctggctttcatccatggaggtttgggccattttggaagaccttaggaagactaggcaactgttagagaacgcttcggacggagtctccggtttttggagattctggttcgctagtgaattagctagggtagtttttaggataaaacaggactataaacaagaatttgaaaagttgttggtagattgcccaggactttttgaagctcttaatttgggccatcaggttcactttaaagaaaaagttttatcagttttagacttttcaaccccaggtagaactgctgctgctgtggcttttcttacttttatattagataaatggatcccgcagactcatttcagcaggggatacgttttggatttcatagccacagcattgtggagaacatggaaggttcgcaagatgaggacaatcttaggttactggccagtgcagcctttgggtgtagcgggaatcctgaggcatccaccggtcatgccagcggttctggaggaggaacagcaagaggacaacccgagagccggcctggaccctccagtggaggaggcggagtagctgacttgtctcctgaactgcaacgggtgcttactggatctacgtccactggacgggataggggcgttaagagggagagggcatctagtggtactgatgctagatctgagttggctttaagtttaatgagtcgcagacgtcctgaaaccatttggtggcatgaggttcagaaagagggaagggatgaagtttctgtattgcaggagaaatattcactggaacaggtgaaaacatgttggttggagcctgaggatgattgggaggtggccattaaaaattatgccaagatagctttgaggcctgataaacagtataagattactagacggattaatatccggaatgcttgttacatatctggaaatggggctgaggtggtaatagatactcaagacaaggcagttattagatgctgcatgatggatatgtggcctggggtagtcggtatggaagcagtaacttttgtaaatgttaagtttaggggagatggttataatggaatagtgtttatggccaataccaaacttatattgcatggttgtagcttttttggtttcaacaatacctgtgtagatgcctggggacaggttagtgtacggggatgtagtttctatgcgtgttggattgccacagctggcagaaccaagagtcaattgtctctgaagaaatgcatatttcaaagatgtaacctgggcattctgaatgaaggcgaagcaagggtccgccactgcgcttctacagatactggatgttttattttgattaagggaaatgccagcgtaaagcataacatgatttgcggtgcttccgatgagaggccttatcaaatgctcacttgtgctggtgggcattgtaatatgctggctactgtgcatattgtttcccatcaacgcaaaaaatggcctgtttttgatcacaatgtgatgacgaagtgtaccatgcatgcaggtgggcgtagaggaatgtttatgccttaccagtgtaacatgaatcatgtgaaagtgttgttggaaccagatgccttttccagaatgagcctaacaggaatttttgacatgaacatgcaaatctggaagatcctgaggtatgatgatacgagatcgagggtacgcgcatgcgaatgcggaggcaagcatgccaggttccagccggtgtgtgtagatgtgactgaagatctcagaccggatcatttggttattgcccgcactggagcagagttcggatccagtggagaagaaactgactaaggtgagtattgggaaaactttggggtgggattttcagatggacagattgagtaaaaatttgttttttctgtcttgcagctgtcatgagtggaaacgcttcttttaaggggggagtcttcagcccttatctgacagggcgtctcccatcctgggcaggagttcgtcagaatgttatgggatctactgtggatggaagacccgtccaacccgccaattcttcaacgctgacctatgctactttaagttcttcacctttggacgcagctgcagctgccgccgccgcttctgttgccgctaacactgtgcttggaatgggttactatggaagcatcatggctaattccacttcctctaataacccttctaccctgactcaggacaagttacttgtccttttggcccagctggaggctttgacccaacgtctgggtgaactttctcagcaggtggtcgagttgcgagtacaaactgagtctgctgtcggcacggcaaagtctaaataaaaaaatcccagaatcaatgaataaataaacaagcttgttgttgatttaaaatcaagtgtttttatttcatttttcgcgcacggtatgccctagaccaccgatctctatcattgagaactcggtggattttttccaggatcctatagaggtgggattgaatgtttagatacatgggcattaggccgtctttggggtggagatagctccattgaagggattcatgctccggggtagtgttgtaaatcacccagtcataacaaggtcgcagtgcatggtgttgcacaatatcttttagaagtaggctgattgccacagataagcccttggtgtaggtgtttacaaaccggttgagctgggatgggtgcattcggggtgaaattatgtgcattttggattggatttttaagttggcaatattgccgccaagatcccgtcttgggttcatgttatgaaggaccaccaagacggtgtatccggtacatttaggaaatttatcgtgcagcttggatggaaaagcgtggaaaaatttggagacacccttgtgtcctccaagattttccatgcactcatccatgataatagcaatggggccgtgggcagcggcgcgggcaaacacgttccgtgggtctgacacatcatagttatgttcctgagttaaatcatcataagccattttaatgaatttggggcggagagtaccagattggggtatgaatgttccttcgggccccggagcatagttcccctcacagatttgcatttcccaagctttcagttccgagggtggaatcatgtccacctggggggctatgaaaaacaccgtttctggggcgggggtgattaattgtgatgatagcaaatttctgagcaattgagatttgccacatccggtggggccataaatgattccgattacgggttgcaggtggtagtttagggaacggcaactgccgtcttctcgaagcaagggggccacctcgttcatcatttcccttacatgcatattttcccgcaccaaatccattaggaggcgctctcctcctagtgatagaagttcttgtagtgaggaaaagtttttcagcggtttcagaccgtcagccatgggcattttggagagagtttgctgcaaaagttctagtctgttccacagttcagtgatgtgttctatggcatctcgatccagcagacctcctcgtttcgcgggtttggacggctcctggaatagggtatgagacgatgggcgtccagcgctgccagggttcggtccttccagggtctcagtgttcgagtcagggttgtttccgtcacagtgaaggggtgtgcgcctgcttgggcgcttgccagggtgcgcttcagactcatcctgctggtcgaaaacttctgtcgcttggcgccctgtatgtcggccaagtagcagtttaccatgagttcgtagttgagcgcctcggctgcgtggcctttggcgcggagcttacctttggaagttttcttgcataccgggcagtataggcatttcagcgcatacaacttgggcgcaaggaaaacggattctggggagtatgcatctgcgccgcaggaggcgcaaacagtttcacattccaccagccaggttaaatccggttcattggggtcaaaaacaagttttccgccatattttttgatgcgtttcttacctttggtctccatgagttcgtgtcctcgttgagtgacaaacaggctgtccgtgtccccgtagactgattttacaggcctcttctccagtggagtgcctcggtcttcttcgtacaggaactctgaccactctgatacaaaggcgcgcgtccaggccagcacaaaggaggctatgtgggaggggtagcgatcgttgtcaaccagggggtccaccttttccaaagtatgcaaacacatgtcaccctcttcaacatccaggaatgtgattggcttgtaggtgtatttcacgtgacctggggtccccgctgggggggtataaaagggggcggttctttgctcttcctcactgtcttccggatcgctgtccaggaacgtcagctgttggggtaggtattccctctcgaaggcgggcatgacctctgcactcaggttgtcagtttctaagaacgaggaggatttgatattgacagtgccggttgagatgcctttcatgaggttttcgtccatctggtcagaaaacacaatttttttattgtcaagtttggtggcaaatgatccatacagggcgttggataaaagtttggcaatggatcgcatggtttggttcttttccttgtccgcgcgctctttggcggcgatgttgagttggacatactcgcgtgccaggcacttccattcggggaagatagttgttaattcatctggcacgattctcacttgccaccctcgattatgcaaggtaattaaatccacactggtggccacctcgcctcgaaggggttcattggtccaacagagcctacctcctttcctagaacagaaagggggaagtgggtctagcataagttcatcgggagggtctgcatccatggtaaagattcccggaagtaaatccttatcaaaatagctgatgggagtggggtcatctaaggccatttgccattctcgagctgccagtgcgcgctcatatgggttaaggggactgccccatggcatgggatgggtgagtgcagaggcatacatgccacagatgtcatagacgtagatgggatcctcaaagatgcctatgtaggttggatagcatcgcccccctctgatacttgctcgcacatagtcatatagttcatgtgatggcgctagcagccccggacccaagttggtgcgattgggtttttctgttctgtagacgatctggcgaaagatggcgtgagaattggaagagatggtgggtctttgaaaaatgttgaaatgggcatgaggtagacctacagagtctctgacaaagtgggcataagattcttgaagcttggttaccagttcggcggtgacaagtacgtctagggcgcagtagtcaagtgtttcttgaatgatgtcataacctggttggtttttcttttcccacagttcgcggttgagaaggtattcttcgcgatccttccagtactcttctagcggaaacccgtctttgtctgcacggtaagatcctagcatgtagaactgattaactgccttgtaagggcagcagcccttctctacgggtagagagtatgcttgagcagcttttcgtagcgaagcgtgagtaagggcaaaggtgtctctgaccatgactttgaggaattggtatttgaagtcgatgtcgtcacaggctccctgttcccagagttggaagtctacccgtttcttgtaggcggggttgggcaaagcgaaagtaacatcattgaagagaatcttgccggccctgggcatgaaattgcgagtgatgcgaaaaggctgtggtacttccgctcggttattgataacctgggcagctaggacgatctcgtcgaaaccgttgatgttgtgtcctacgatgtataattctatgaaacgcggcgtgcctctgacgtgaggtagcttactgagctcatcaaaggttaggtctgtggggtcagataaggcgtagtgttcgagagcccattcgtgcaggtgaggattcgctttaaggaaggaggaccagaggtccactgccagtgctgtttgtaactggtcccggtactgacgaaaatgccgtccgactgccattttttctggggtgacgcaatagaaggtttgggggtcctgccgccagcgatcccacttgagttttatggcgaggtcataggcgatgttgacgagccgctggtctccagagagtttcatgaccagcatgaaggggattagctgcttgccaaaggaccccatccaggtgtaggtttccacatcgtaggtgagaaagagcctttctgtgcgaggatgagagccaatcgggaagaactggatctcctgccaccagttggaggaatggctgttgatgtgatggaagtagaactccctgcgacgcgccgagcattcatgcttgtgcttgtacagacggccgcagtagtcgcagcgttgcacgggttgtatctcgtgaatgagttgtacctggcttcccttgacgagaaatttcagtgggaagccgaggcctggcgattgtatctcgtgctttactatgttgtctgcatcggcctgttcatcttctgtctcgatggtggtcatgctgacgagccctcgcgggaggcaagtccagacctcggcgcggcaggggcggagctcgaggacgagagcgcgcaggctggagctgtccagggtcctgagacgctgcggactcaggttagtaggcagtgtcaggagattaacttgcatgatcttttggagggcgtgcgggaggttcagatagtacttgatctcaacgggtccgttggtggagatgtcgatggcttgcagggttccgtgtcccttgggcgctaccaccgtgcccttgtttttcattttggacggcggtggctctgttgcttcttgcatgtttagaagcggtgtcgagggcgcgcaccgggcggcaggggcggctcgggacccggcggcatggctggcagtggtacgtcggcgccgcgcgcgggtaggttctggtactgcgccctgagaagactcgcatgcgcgacgacgcggcggttgacatcctggatctgacgcctctgggtgaaagctaccggccccgtgagcttgaacctgaaagagagttcaacagaatcaatctcggtatcgttgacggcggcttgcctaaggatttcttgcacgtcaccagagttgtcctggtaggcgatctccgccatgaactgctcgatctcttcctcttgaagatctccgcggcccgctctctcgacggtggccgcgaggtcgttggagatgcgcccaatgagttgagagaatgcattcatgcccgcctcgttccagacgcggctgtagaccacggcccccacgggatctctcgcgcgcatgaccacctgggcgaggttgagctccacgtggcgggtgaagaccgcatagttgcataggcgctggaaaaggtagttgagtgtggtggcgatgtgctcggtgacgaagaaatacatgatccatcgtctcagcggcatctcgctgacatcgcccagagcttccaagcgctccatggcctcgtagaagtccacggcaaaattaaaaaactgggagtttcgcgcggacacggtcaactcctcttccagaagacggataagttcggcgatggtggtgcgcacctcgcgctcgaaagcccctgggatttcttcctcaatctcttcttcttccactaacatctcttcctcttcaggtggggctgcaggaggagggggaacgcggcgacgccggcggcgcacgggcagacggtcgatgaatctttcaatgacctctccgcggcggcggcgcatggtttcagtgacggcgcggccgttctcgcgcggtcgcagagtaaaaacaccgccgcgcatctccttaaagtggtgactgggaggttctccgtttgggagggagagggcgctgattatacattttattaattggcccgtagggactgcacgcagagatctgatcgtgtcaagatccacgggatctgaaaacctttcgacgaaagcgtctaaccagtcacagtcacaaggtaggctgagtacggcttcttgtgggcgggggtggttatgtgttcggtctgggtcttctgtttcttcttcatctcgggaaggtgagacgatgctgctggtgatgaaattaaagtaggcagttctaagacggcggatggtggcgaggagcaccaggtctttgggtccggcttgctggatacgcaggcgattggccattccccaagcattatcctgacatctagcaagatctttgtagtagtcttgcatgagccgttctacgggcacttcttcctcacccgttctgccatgcatacgtgtgagtccaaatccgcgcattggttgtaccagtgccaagtcagctacgactctttcggcgaggatggcttgctgtacttgggtaagggtggcttgaaagtcatcaaaatccacaaagcggtggtaagctcctgtattaatggtgtaagcacagttggccatgactgaccagttaactgtctggtgaccagggcgcacgagctcggtgtatttaaggcgcgaataggcgcgggtgtcaaagatgtaatcgttgcaggtgcgcaccagatactggtaccctataagaaaatgcggcggtggttggcggtagagaggccatcgttctgtagctggagcgccaggggcgaggtcttccaacataaggcggtgatagccgtagatgtacctggacatccaggtgattcctgcggcggtagtagaagcccgaggaaactcgcgtacgcggttccaaatgttgcgtagcggcatgaagtagttcattgtaggcacggtttgaccagtgaggcgcgcgcagtcattgatgctctatagacacggagaaaatgaaagcgttcagcgactcgactccgtagcctggaggaacgtgaacgggttgggtcgcggtgtaccccggttcgagacttgtactcgagccggccggagccgcggctaacgtggtattggcactcccgtctcgacccagcctacaaaaatccaggatacggaatcgagtcgttttgctggtttccgaatggcagggaagtgagtcctattttttttttttgccgctcagatgcatcccgtgctgcgacagatgcgcccccaacaacagcccccctcgcagcagcagcagcagcaatcacaaaaggctgtccctgcaactactgcaactgccgccgtgagcggtgcgggacagcccgcctatgatctggacttggaagagggcgaaggactggcacgtctaggtgcgccttcacccgagcggcatccgcgagttcaactgaaaaaagattctcgcgaggcgtatgtgccccaacagaacctatttagagacagaagcggcgaggagccggaggagatgcgagcttcccgctttaacgcgggtcgtgagctgcgtcacggtttggaccgaagacgagtgttgcgggacgaggatttcgaagttgatgaaatgacagggatcagtcctgccagggcacacgtggctgcagccaaccttgtatcggcttacgagcagacagtaaaggaagagcgtaacttccaaaagtcttttaataatcatgtgcgaaccctgattgcccgcgaagaagttacccttggtttgatgcatttgtgggatttgatggaagctatcattcagaaccctactagcaaacctctgaccgcccagctgtttctggtggtgcaacacagcagagacaatgaggctttcagagaggcgctgctgaacatcaccgaacccgaggggagatggttgtatgatcttatcaacattctacagagtatcatagtgcaggagcggagcctgggcctggccgagaaggtggctgccatcaattactcggttttgagcttgggaaaatattacgctcgcaaaatctacaagactccatacgttcccatagacaaggaggtgaagatagatgggttctacatgcgcatgacgctcaaggtcttgaccctgagcgatgatcttggggtgtatcgcaatgacagaatgcatcgcgcggttagcgccagcaggaggcgcgagttaagcgacagggaactgatgcacagtttgcaaagagctctgactggagctggaaccgagggtgagaattacttcgacatgggagctgacttgcagtggcagcctagtcgcagggctctgagcgccgcgacggcaggatgtgagcttccttacatagaagaggcggatgaaggcgaggaggaagagggcgagtacttggaagactgatggcacaacccgtgttttttgctagatggaacagcaagcaccggatcccgcaatgcgggcggcgctgcagagccagccgtccggcattaactcctcggacgattggacccaggccatgcaacgtatcatggcgttgacgactcgcaaccccgaagcctttagacagcaaccccaggccaaccgtctatcggccatcatggaagctgtagtgccttcccgctctaatcccactcatgagaaggtcctggccatcgtgaacgcgttggtggagaacaaagctattcgtccagatgaggccggactggtatacaacgctctcttagaacgcgtggctcgctacaacagtagcaatgtgcaaaccaatttggaccgtatgataacagatgtacgcgaagccgtgtctcagcgcgaaaggttccagcgtgatgccaacctgggttcgctggtggcgttaaatgctttcttgagtactcagcctgctaatgtgccgcgtggtcaacaggattatactaactttttaagtgctttgagactgatggtatcagaagtacctcagagcgaagtgtatcagtccggtcctgattacttctttcagactagcagacagggcttgcagacggtaaatctgagccaagcttttaaaaaccttaaaggtttgtggggagtgcatgccccggtaggagaaagagcaaccgtgtctagcttgttaactccgaactcccgcctattattactgttggtagctcctttcaccgacagcggtagcatcgaccgtaattcctatttgggttacctactaaacctgtatcgcgaagccatagggcaaagtcaggtggacgagcagacctatcaagaaattacccaagtcagtcgcgctttgggacaggaagacactggcagtttggaagccactctgaacttcttgcttaccaatcggtctcaaaagatccctcctcaatatgctcttactgcggaggaggagaggatccttagatatgtgcagcagagcgtgggattgtttctgatgcaagagggggcaactccgactgcagcactggacatgacagcgcgaaatatggagcccagcatgtatgccagtaaccgacctttcattaacaaactgctggactacttgcacagagctgccgctatgaactctgattatttcaccaatgccatcttaaacccgcactggctgcccccacctggtttctacacgggcgaatatgacatgcccgaccctaatgacggatttctgtgggacgacgtggacagcgatgttttttcacctctttctgatcatcgcacgtggaaaaaggaaggcggcgatagaatgcattcttctgcatcgctgtccggggtcatgggtgctaccgcggctgagcccgagtctgcaagtccttttcctagtctacccttttctctacacagtgtacgtagcagcgaagtgggtagaataagtcgcccgagtttaatgggcgaagaggagtatctaaacgattccttgctcagaccggcaagagaaaaaaatttcccaaacaatggaatagaaagtttggtggataaaatgagtagatggaagacttatgctcaggatcacagagacgagcctgggatcatggggattacaagtagagcgagccgtagacgccagcgccatgacagacagaggggtcttgtgtgggacgatgaggattcggccgatgatagcagcgtgctggacttgggtgggagaggaaggggcaacccgtttgctcatttgcgccctcgcttgggtggtatgttgtaaaaaaaaataaaaaaaaaactcaccaaggccatggcgacgagcgtacgttcgttcttctttattatctgtgtctagtataatgaggcgagtcgtgctaggcggagcggtggtgtatccggagggtcctcctccttcgtacgagagcgtgatgcagcagcagcaggcgacggcggtgatgcaatccccactggaggctccctttgtgcctccgcgatacctggcacctacggagggcagaaacagcattcgttattcggaactggcacctcagtacgataccaccaggttgtatctggtggacaacaagtcggcggacattgcttctctgaactatcagaatgaccacagcaacttcttgaccacggtggtgcaaaacaatgactttacccctacggaagccagcacccagaccattaactttgatgaacgatcgcggtggggcggtcagctaaagaccatcatgcatactaacatgccaaacgtgaacgagtatatgtttagtaacaagttcaaagcgcgtgtgatggtgtccagaaaacctcccgacggtgctgcagttggggatacttatgatcacaagcaggatattttgaaatatgagtggttcgagtttactttgccagaaggcaacttttcagttactatgactattgatttgatgaacaatgccatcatagataattacttgaaagtgggtagacagaatggagtgcttgaaagtgacattggtgttaagttcgacaccaggaacttcaagctgggatgggatcccgaaaccaagttgatcatgcctggagtgtatacgtatgaagccttccatcctgacattgtcttactgcctggctgcggagtggattttaccgagagtcgtttgagcaaccttcttggtatcagaaaaaaacagccatttcaagagggttttaagattttgtatgaagatttagaaggtggtaatattccggccctcttggatgtagatgcctatgagaacagtaagaaagaacaaaaagccaaaatagaagctgctacagctgctgcagaagctaaggcaaacatagttgccagcgactctacaagggttgctaacgctggagaggtcagaggagacaattttgcgccaacacctgttccgactgcagaatcattattggccgatgtgtctgaaggaacggacgtgaaactcactattcaacctgtagaaaaagatagtaagaatagaagctataatgtgttggaagacaaaatcaacacagcctatcgcagttggtatctttcgtacaattatggcgatcccgaaaaaggagtgcgttcctggacattgctcaccacctcagatgtcacctgcggagcagagcaggtctactggtcgcttccagacatgatgaaggatcctgtcactttccgctccactagacaagtcagtaactaccctgtggtgggtgcagagcttatgcccgtcttctcaaagagcttctacaacgaacaagctgtgtactcccagcagctccgccagtccacctcgcttacgcacgtcttcaaccgctttcctgagaaccagattttaatccgtccgccggcgcccaccattaccaccgtcagtgaaaacgttcctgctctcacagatcacgggaccctgccgttgcgcagcagtatccggggagtccaacgtgtgaccgttactgacgccagacgccgcacctgtccctacgtgtacaaggcactgggcatagtcgcaccgcgcgtcctttcaagccgcactttctaaaaaaaaaaaaaatgtccattcttatctcgcccagtaataacaccggttggggtctgcgcgctccaagcaagatgtacggaggcgcacgcaaacgttctacccaacatcctgtccgtgttcgcggacattttcgcgctccatggggcgccctcaagggccgcactcgcgttcgaaccaccgtcgatgatgtaatcgatcaggtggttgccgacgcccgtaattatactcctactgcgcctacatctactgtggatgcagttattgacagtgtagtggctgacgctcgcaactatgctcgacgtaagagccggcgaaggcgcattgccagacgccaccgagctaccactgccatgcgagccgcaagagctctgctacgaagagctagacgcgtggggcgaagagccatgcttagggcggccagacgtgcagcttcgggcgccagcgccggcaggtcccgcaggcaagcagccgctgtcgcagcggcgactattgccgacatggcccaatcgcgaagaggcaatgtatactgggtgcgtgacgctgccaccggtcaacgtgtacccgtgcgcacccgtccccctcgcacttagaagatactgagcagtctccgatgttgtgtcccagcggcgaggatgtccaagcgcaaatacaaggaagaaatgctgcaggttatcgcacctgaagtctacggccaaccgttgaaggatgaaaaaaaaccccgcaaaatcaagcgggttaaaaaggacaaaaaagaagaggaagatggcgatgatgggctggcggagtttgtgcgcgagtttgccccacggcgacgcgtgcaatggcgtgggcgcaaagttcgacatgtgttgagacctggaacttcggtggtctttacacccggcgagcgttcaagcgctacttttaagcgttcctatgatgaggtgtacggggatgatgatattcttgagcaggcggctgaccgattaggcgagtttgcttatggcaagcgtagtagaataacttccaaggatgagacagtgtcgatacccttggatcatggaaatcccacccctagtcttaaaccggtcactttgcagcaagtgttacccgtaactccgcgaacaggtgttaaacgcgaaggtgaagatttgtatcccactatgcaactgatggtacccaaacgccagaagttggaggacgttttggagaaagtaaaagtggatccagatattcaacctgaggttaaagtgagacccattaagcaggtagcgcctggtctgggggtacaaactgtagacattaagattcccactgaaagtatggaagtgcaaactgaacccgcaaagcctactgccacctccactgaagtgcaaacggatccatggatgcccatgcctattacaactgacgccgccggtcccactcgaagatcccgacgaaagtacggtccagcaagtctgttgatgcccaattatgttgtacacccatctattattcctactcctggttaccgaggcactcgctactatcgcagccgaaacagtacctcccgccgtcgccgcaagacacctgcaaatcgcagtcgtcgccgtagacgcacaagcaaaccgactcccggcgccctggtgcggcaagtgtaccgcaatggtagtgcggaacctttgacactgccgcgtgcgcgttaccatccgagtatcatcacttaatcaatgttgccgctgcctccttgcagatatggccctcacttgtcgccttcgcgttcccatcactggttaccgaggaagaaactcgcgccgtagaagagggatgttgggacgcggaatgcgacgctacaggcgacggcgtgctatccgcaagcaattgcggggtggttttttaccagccttaattccaattatcgctgctgcaattggcgcgataccaggcatagcttccgtggcggttcaggcctcgcaacgacattgacattggaaaaaaacgtataaataaaaaaaaaaaaatacaatggactctgacactcctggtcctgtgactatgttttcttagagatggaagacatcaatttttcatccttggctccgcgacacggcacgaagccgtacatgggcacctggagcgacatcggcacgagccaactgaacgggggcgccttcaattggagcagtatctggagcgggcttaaaaattttggctcaaccataaaaacatacgggaacaaagcttggaacagcagtacaggacaggcgcttagaaataaacttaaagaccagaacttccaacaaaaagtagtcgatgggatagcttccggcatcaatggagtggtagatttggctaaccaggctgtgcagaaaaagataaacagtcgtttggacccgccgccagcaaccccaggtgaaatgcaagtggaggaagaaattcctccgccagaaaaacgaggcgacaagcgtccgcgtcccgatttggaagagacgctggtgacgcgcgtagatgaaccgccttcttatgaggaagcaacgaagcttggaatgcccaccactagaccgatagccccaatggccaccggggtgatgaaaccttctcagttgcatcgacccgtcaccttggatttgccccctccccctgctgctactgctgtacccgcttctaagcctgtcgctgccccgaaaccagtcgccgtagccaggtcacgtcccgggggcgctcctcgtccaaatgcgcactggcaaaatactctgaacagcatcgtgggtctaggcgtgcaaagtgtaaaacgccgtcgctgcttttaattaaatatggagtagcgcttaacttgcctatctgtgtatatgtgtcattacacgccgtcacagcagcagaggaaaaaaggaagaggtcgtgcgtcgacgctgagttactttcaagatggccaccccatcgatgctgccccaatgggcatacatgcacatcgccggacaggatgcttcggagtacctgagtccgggtctggtgcagttcgcccgcgccacagacacctacttcaatctgggaaataagtttagaaatcccaccgtagcgccgacccacgatgtgaccaccgaccgtagccagcggctcatgttgcgcttcgtgcccgttgaccgggaggacaatacatactcttacaaagtgcggtacaccctggccgtgggcgacaacagagtgctggatatggccagcacgttctttgacattaggggtgtgttggacagaggtcccagtttcaaaccctattctggtacggcttacaactccctggctcctaaaggcgctccaaatacatctcagtggattgcagaaggtgtaaaaaatacaactggtgaggaacacgtaacagaagaggaaaccaatactactacttacacttttggcaatgctcctgtaaaagctgaagctgaaattacaaaagaaggactcccagtaggtttggaagtttcagatgaagaaagtaaaccgatttatgctgataaaacatatcagccagaacctcagctgggagatgaaacttggactgaccttgatggaaaaaccgaaaagtatggaggcagggctctcaaacccgatactaagatgaaaccatgctacgggtcctttgccaaacctactaatgtgaaaggcggtcaggcaaaacaaaaaacaacggagcagccaaatcagaaagtcgaatatgatatcgacatggagttttttgatgcggcatcgcagaaaacaaacttaagtcctaaaattgtcatgtatgcagaaaatgtaaatttggaaactccagacactcatgtagtgtacaaacctggaacagaagacacaagttccgaagctaatttgggacaacaatctatgcccaacagacccaactacattggcttcagagataactttattggacttatgtactataacagtactggtaacatgggggtgctggctggtcaagcgtctcagttaaatgcagtggttgacttgcaggacagaaacacagaactttcttaccaactcttgcttgactctctgggcgacagaaccagatactttagcatgtggaatcaggctgtggacagttatgatcctgatgtacgtgttattgaaaatcatggtgtggaagatgaacttcccaactactgttttccactggacggcataggtgttccaacaaccagttacaaatcaatagttccaaatggagacaatgcgcctaattggaaggaacctgaagtaaatggaacaagtgagatcggacagggtaatttgtttgccatggaaattaaccttcaagccaatctatggcgaagtttcctttattccaatgtggctctatatctcccagactcgtacaaatacaccccgtccaatgtcactcttccagaaaacaaaaacacctacgactacatgaacgggcgggtggtgccgccatctctagtagacacctatgtgaacattggtgccaggtggtctctggatgccatggacaatgtcaacccattcaaccaccaccgtaacgctggcttgcgttaccgatccatgcttctgggtaacggacgttatgtgcctttccacatacaagtgcctcaaaaattcttcgctgttaaaaacctgctgcttctcccaggctcctacacttatgagtggaactttaggaaggatgtgaacatggttctacagagttccctcggtaacgacctgcgggtagatggcgccagcatcagtttcacgagcatcaacctctatgctacttttttccccatggctcacaacaccgcttccacccttgaagccatgctgcggaatgacaccaatgatcagtcattcaacgactacctatctgcagctaacatgctctaccccattcctgccaatgcaaccaatattcccatttccattccttctcgcaactgggcggctttcagaggctggtcatttaccagactgaaaaccaaagaaactccctctttggggtctggatttgacccctactttgtctattctggttctattccctacctggatggtaccttctacctgaaccacacttttaagaaggtttccatcatgtttgactcttcagtgagctggcctggaaatgacaggttactatctcctaacgaatttgaaataaagcgcactgtggatggcgaaggctacaacgtagcccaatgcaacatgaccaaagactggttcttggtacagatgctcgccaactacaacatcggctatcagggcttctacattccagaaggatacaaagatcgcatgtattcatttttcagaaacttccagcccatgagcaggcaggtggttgatgaggtcaattacaaagacttcaaggccgtcgccataccctaccaacacaacaactctggctttgtgggttacatggctccgaccatgcgccaaggtcaaccctatcccgctaactatccctatccactcattggaacaactgccgtaaatagtgttacgcagaaaaagttcttgtgtgacagaaccatgtggcgcataccgttctcgagcaacttcatgtctatgggggcccttacagacttgggacagaatatgctctatgccaactcagctcatgctctggacatgacctttgaggtggatcccatggatgagcccaccctgctttatcttctcttcgaagttttcgacgtggtcagagtgcatcagccacaccgcggcatcatcgaggcagtctacctgcgtacaccgttctcggccggtaacgctaccacgtaagaagcttcttgcttcttgcaaatagcagctgcaaccatggcctgcggatcccaaaacggctccagcgagcaagagctcagagccattgtccaagacctgggttgcggaccctattttttgggaacctacgataagcgcttcccggggttcatggcccccgataagctcgcctgtgccattgtaaatacggccggacgtgagacggggggagagcactggttggctttcggttggaacccacgttctaacacctgctacctttttgatccttttggattctcggatgatcgtctcaaacagatttaccagtttgaatatgagggtctcctgcgccgcagcgctcttgctaccaaggaccgctgtattacgctggaaaaatctacccagaccgtgcagggtccccgttctgccgcctgcggacttttctgctgcatgttccttcacgcctttgtgcactggcctgaccgtcccatggacggaaaccccaccatgaaattgctaactggagtgccaaacaacatgcttcattctcctaaagtccagcccaccctgtgtgacaatcaaaaagcactctaccattttcttaatacccattcgccttattttcgctcccatcgtacacacatcgaaagggccactgcgttcgaccgtatggatgttcaataatgactcatgtaaacaacgtgttcaataaacatcactttatttttttacatgtatcaaggctctgcattacttatttatttacaagtcgaatgggttctgacgagaatcagaatgacccgcaggcagtgatacgttgcggaactgatacttgggttgccacttgaattcgggaatcaccaacttgggaaccggtatatcgggcaggatgtcactccacagctttctggtcagctgcaaagctccaagcaggtcaggagccgaaatcttgaaatcacaattaggaccagtgctttgagcgcgagagttgcggtacaccggattgcagcactgaaacaccatcagcgacggatgtctcacgcttgccagcacggtgggatctgcaatcatgcccacatccagatcttcagcattggcaatgctgaacggggtcatcttgcaggtctgcctacccatggcgggcacccaattaggcttgtggttgcaatcgcagtgcagggggatcagtatcatcttggcctgatcctgtctgattcctggatacacggctctcatgaaagcatcatattgcttgaaagcctgctgggctttactaccctcggtataaaacatcccgcaggacctgctcgaaaactggttagctgcacagccggcatcattcacacagcagcgggcgtcattgttagctatttgcaccacacttctgccccagcggttttgggtgattttggttcgctcgggattctcctttaaggctcgttgtccgttctcgctggccacatccatctcgataatctgctccttctgaatcataatattgccatgcaggcacttcagcttgccctcataatcattgcagccatgaggccacaacgcacagcctgtacattcccaattatggtgggcgatctgagaaaaagaatgtatcattccctgcagaaatcttcccatcatcgtgctcagtgtcttgtgactagtgaaagttaactggatgcctcggtgctcctcgtttacgtactggtgacagatgcgcttgtattgttcgtgttgctcaggcattagtttaaaagaggttctaagttcgttatccagcctgtacttctccatcagcagacacatcacttccatgcctttctcccaagcagacaccaggggcaagctaatcggattcttaacagtgcaggcagcagctcctttagccagagggtcatctttagcgatcttctcaatgcttcttttgccatccttctcaacgatgcgcacgggcgggtagctgaaacccactgctacaagttgcgcctcttctctttcttcttcgctgtcttgactgatgtcttgcatggggatatgtttggtcttccttggcttctttttggggggtatcggaggaggaggactgtcgctccgttccggagacagggaggattgtgacgtttcgctcaccattaccaactgactgtcggtagaagaacctgaccccacacggcgacaggtgtttctcttcgggggcagaggtggaggcgattgcgaagggctgcggtccgacctggaaggcggatgactggcagaaccccttccgcgttcgggggtgtgctccctgtggcggtcgcttaactgatttccttcgcggctggccattgtgttctcctaggcagagaaacaacagacatggaaactcagccattgctgtcaacatcgccacgagtgccatcacatctcgtcctcagcgacgaggaaaaggagcagagcttaagcattccaccgcccagtcctgccaccacctctaccctagaagataaggaggtcgacgcatctcatgacatgcagaataaaaaagcgaaagagtctgagacagacatcgagcaagacccgggctatgtgacaccggtggaacacgaggaagagttgaaacgctttctagagagagaggatgaaaactgcccaaaacaacgagcagataactatcaccaagatgctggaaatagggatcagaacaccgactacctcatagggcttgacggggaagacgcgctccttaaacatctagcaagacagtcgctcatagtcaaggatgcattattggacagaactgaagtgcccatcagtgtggaagagctcagccgcgcctacgagcttaacctcttttcacctcgtactccccccaaacgtcagccaaacggcacctgcgagccaaatcctcgcttaaacttttatccagcttttgctgtgccagaagtactggctacctatcacatcttttttaaaaatcaaaaaattccagtctcctgccgcgctaatcgcacccgcgccgatgccctactcaatctgggacctggttcacgcttacctgatatagcttccttggaagaggttccaaagatcttcgagggtctgggcaataatgagactcgggccgcaaatgctctgcaaaagggagaaaatggcatggatgagcatcacagcgttctggtggaattggaaggcgataatgccagactcgcagtactcaagcgaagcatcgaggtcacacacttcgcatatcccgctgtcaacctgccccctaaagtcatgacggcggtcatggaccagttactcattaagcgcgcaagtcccctttcagaagacatgcatgacccagatgcctgtgatgagggtaaaccagtggtcagtgatgagcagctaacccgatggctgggcaccgactctcccagggatttggaagagcgtcgcaagcttatgatggccgtggtgctggttaccgtagaactagagtgtctccgacgtttctttaccgattcagaaaccttgcgcaaactcgaagagaatctgcactacacttttagacacggctttgtgcggcaggcatgcaagatatctaacgtggaactcaccaacctggtttcctacatgggtattctgcatgagaatcgcctaggacaaagcgtgctgcacagcaccctgaagggggaagcccgccgtgattacatccgcgattgtgtctatctgtacctgtgccacacgtggcaaaccggcatgggtgtatggcagcaatgtttagaagaacagaacttgaaagagcttgacaagctcttacagaaatctcttaaggttctgtggacagggttcgacgagcgcaccgtcgcttccgacctggcagacctcatcttcccagagcgtctcagggttactttgcgaaacggattgcctgactttatgagccagagcatgcttaacaattttcgctctttcatcctggaacgctccggtatcctgcccgccacctgctgcgcactgccctccgactttgtgcctctcacctaccgcgagtgccccccgccgctatggagtcactgctacctgttccgtctggccaactatctctcctaccactcggatgtgatcgaggatgtgagcggagacggcttgctggagtgtcactgccgctgcaatctgtgcacgccccaccggtccctagcttgcaacccccagttgatgagcgaaacccagataataggcacctttgaattgcaaggccccagcagccaaggcgatgggtcttctcctgggcaaagtttaaaactgaccccgggactgtggacctccgcctacttgcgcaagtttgctccggaagattaccacccctatgaaatcaagttctatgaggaccaatcacagcctccaaaggccgaactttcggcctgcgtcatcacccagggggcaattctggcccaattgcaagccatccaaaaatcccgccaagaatttctactgaaaaagggtaagggggtctaccttgacccccagaccggcgaggaactcaacacaaggttccctcaggatgtcccaacgacgagaaaacaagaagttgaaggtgcagccgccgcccccagaagatatggaggaagattgggacagtcaggcagaggaggcggaggaggacagtctggaggacagtctggaggaagacagtttggaggaggaaaacgaggaggcagaggaggtggaagaagtaaccgccgacaaacagttatcctcggctgcggagacaagcaacagcgctaccatctccgctccgagtcgaggaacccggcggcgtcccagcagtagatgggacgagaccggacgcttcccgaacccaaccagcgcttccaagaccggtaagaaggatcggcagggatacaagtcctggcgggggcataagaatgccatcatctcctgcttgcatgagtgcgggggcaacatatccttcacgcggcgctacttgctattccaccatggggtgaactttccgcgcaatgttttgcattactaccgtcacctccacagcccctactatagccagcaaatcccggcagtctcgacagataaagacagcggcggcgacctccaacagaaaaccagcagcggcagttagaaaatacacaacaagtgcagcaacaggaggattaaagattacagccaacgagccagcgcaaacccgagagttaagaaatcggatctttccaaccctgtatgccatcttccagcagagtcggggtcaagagcaggaactgaaaataaaaaaccgatctctgcgttcgctcaccagaagttgtttgtatcacaagagcgaagatcaacttcagcgcactctcgaggacgccgaggctctcttcaacaagtactgcgcgctgactcttaaagagtaggcagcgaccgcgcttattcaaaaaaggcgggaattacatcatcctcgacatgagtaaagaaattcccacgccttacatgtggagttatcaaccccaaatgggattggcggcaggcgcctcccaggactactccacccgcatgaattggctcagcgccgggccttctatgatttctcgagttaatgatatacgcgcctaccgaaaccaaatacttttggaacagtcagctcttaccaccacgccccgccaacaccttaatcccagaaattggcccgccgccctagtgtaccaggaaagtcccgctcccaccactgtattacttcctcgagacgcccaggccgaagtccaaatgactaatgcaggtgcgcagttagctggcggctccaccctatgtcgtcacaggcctcggcataatataaaacgcctgatgatcagaggccgaggtatccagctcaacgacgagtcggtgagctctccgcttggtctacgaccagacggaatctttcagattgccggctgcgggagatcttccttcacccctcgtcaggctgttctgactttggaaagttcgtcttcgcaaccccgctcgggcggaatcgggaccgttcaatttgtggaggagtttactccctctgtctacttcaaccccttctccggatctcctgggcattacccggacgagttcataccgaacttcgacgcgattagcgagtcagtggacggctacgattgatgtctggtgacgcggctgagctatctcggctgcgacatctagaccactgccgccgctttcgctgctttgcccgggaactcattgagttcatctacttcgaactccccaaggatcaccctcaaggtccggcccacggagtgcggatttctatcgaaggcaaaatagactctcgcctgcaacgaattttctcccagcggcccgtgctgatcgagcgagaccagggaaacaccacggtttccatctactgcatttgtaatcaccccggattgcatgaaagcctttgctgtcttatgtgtactgagtttaataaaaactgaattaagactctcctacggactgccgcttcttcaacccggattttacaaccagaagaacgaaacttttcctgtcgtccaggactctgttaacttcacctttcctactcacaaactagaagctcaacgactacaccgcttttccagaagcattttccctactaatactactttcaaaaccggaggtgagctccaaggtcttcctacagaaaacccttgggtggaagcgggccttgtagtgctaggaattcttgcgggtgggcttgtgattattctttgctacctatacacaccttgcttcactttcttagtggtgttgtggtattggtttaaaaaatggggcccatactagtcttgcttgttttactttcgcttttggaaccgggttctgccaattacgatccatgtctagacttcgacccagaaaactgcacacttacttttgcacccgacacaagccgcatctgtggagttcatcgcctctcttacgaacttggcccccaacgacaaaaatttacctgcatggtgggaatcaaccccatagttatcacccagcaaagtggagatactaagggttgcattcactgctcctgcgattccatcgagtgcacctacaccctgctgaagaccctatgcggcctaagagacctgctaccaatgaattaaaaaatgattaataaaaaatcacttacttgaaatcagcaataaggtctctgttgaaattttctcccagcagcacctcacttccctcttcccaactctggtattctaaaccccgttcagcggcatactttctccatactttaaaggggatgtcaaattttagctcctctcctgtacccacaatcttcatgtctttcttcccagatgaccaagagagtccggctcagtgactccttcaaccctgtctacccctatgaagatgaaagcacctcccaacacccctttataaacccagggtttatttccccaaatggcttcacacaaagcccaaacggagttcttactttaaaatgtttaaccccactaacaaccacaggcggatctctacagctaaaagtgggagggggacttacagtggatgacaccaacggttttttgaaagaaaacataagtgccaccacaccactcgttaagactggtcactctataggtttaccactaggagccggattgggaacgaatgaaaataaactttgtatcaaattaggacaaggacttacattcaattcaaacaacatttgcattgatgacaatattaacaccttatggacaggagtcaaccccaccgaagccaactgtcaaatcatgaactccagtgaatctaatgattgcaaattaattctaacactagttaaaactggagcactagtcactgcatttgtttatgttataggagtatctaacaattttaatatgctaactacacacagaaatataaattttactgcagagctgtttttcgattctactggtaatttactaactagactctcatccctcaaaactccacttaatcataaatcaggacaaaacatggctactggtgccattactaatgctaaaggtttcatgcccagcacgactgcctatcctttcaatgataattctagagaaaaagaaaactacatttacggaacttgttactacacagctagtgatcgcactgcttttcccattgacatatctgtcatgcttaaccgaagagcaataaatgacgagacatcatattgtattcgtataacttggtcctggaacacaggagatgccccagaggtgcaaacctctgctacaaccctagtcacctccccatttaccttttactacatcagagaagacgactgacaaataaagtttgcgatcgccaggcccaccatgccgctgctgctactgctgcccctgctgtgggcaggggccctggctaactgggtgaatgtaataagtgatttgaaaaaaattgaagatcttattcaatctatgcatattgatgctactttatatacggaaagtgatgttcaccccagttgcaaagtaacagcaatgaagtgctttctcttggagttacaagttatttcacttgagtccggagatgcaagtattcatgatacagtagaaaatctgatcatcctagcaaacaacagtttgtcttctaatgggaatgtaacagaatctggatgcaaagaatgtgaggaactggaggaaaaaaatattaaagaatttttgcagagttttgtacatattgtccaaatgttcatcaacacttctggaagcggagctactaacttcagcctgctgaagcaggctggagacgtggaggagaaccctggacctgccttgacctttgctttactggtggccctcctggtgctcagctgcaagtcaagctgctctgtgggctgtgatctgcctcaaacccacagcctgggtagcaggaggaccttgatgctcctggcacagatgaggagaatctctcttttctcctgcttgaaggacagacatgactttggatttccccaggaggagtttggcaaccagttccaaaaggctgaaaccatccctgtcctccatgagatgatccagcagatcttcaatctcttcagcacaaaggactcatctgctgcttgggatgagaccctcctagacaaattctacactgaactctaccagcagctgaatgacctggaagcctgtgtgatacagggggtgggggtgacagagactcccctgatgaaggaggactccattctggctgtgaggaaatacttccaaagaatcactctctatctgaaagagaagaaatacagcccttgtgcctgggaggttgtcagagcagaaatcatgagatctttttctttgtcaacaaacttgcaagaaagtttaagaagtaaggaaggaagcggacagtgtactaattatgctctcttgaaattggctggagatgttgagagcaaccctggacctatgtgtcaccagcagttggtcatctcttggttttccctggtttttctggcatctcccctcgtggccatatgggaactgaagaaagatgtttatgtcgtagaattggattggtatccggatgcccctggagaaatggtggtcctcacctgtgacacccctgaagaagatggtatcacctggaccttggaccagagcagtgaggtcttaggctctggcaaaaccctgaccatccaagtcaaagagtttggagatgctggccagtacacctgtcacaaaggaggcgaggttctaagccattcgctcctgctgcttcacaaaaaggaagatggaatttggtccactgatattttaaaggaccagaaagaacccaaaaataagacctttctaagatgcgaggccaagaattattctggacgtttcacctgctggtggctgacgacaatcagtactgatttgacattcagtgtcaaaagcagcagaggctcttctgacccccaaggggtgacgtgcggagctgctacactctctgcagagagagtcagaggggacaacaaggagtatgagtactcagtggagtgccaggaggacagtgcctgcccagctgctgaggagagtctgcccattgaggtcatggtggatgccgttcacaagctcaagtatgaaaactacaccagcagcttcttcatcagggacatcatcaaacctgacccacccaagaacttgcagctgaagccattaaagaattctcggcaggtggaggtcagctgggagtaccctgacacctggagtactccacattcctacttctccctgacattctgcgttcaggtccagggcaagagcaagagagaaaagaaagatagagtcttcacggacaagacctcagccacggtcatctgccgcaaaaatgccagcattagcgtgcgggcccaggaccgctactatagctcatcttggagcgaatgggcatctgtgccctgcagtggagggggcggcagcgggggaggcggcagcggcggcgggggatcgagaaacctccccgtggccactccagacccaggaatgttcccatgccttcaccactcccaaaacctgctgagggccgtcagcaacatgctccagaaggccagacaaactctagaattttacccttgcacttctgaagagattgatcatgaagatatcacaaaagataaaaccagcacagtggaggcctgtttaccattggaattaaccaagaatgagagttgcctaaattccagagagacctctttcataactaatgggagttgcctggcctccagaaagacctcttttatgatggccctgtgccttagtagtatttatgaagacttgaagatgtaccaggtggagttcaagaccatgaatgcaaagcttctgatggatcctaagaggcagatctttctagatcaaaacatgctggcagttattgatgagctgatgcaggccctgaatttcaacagtgagactgtgccacaaaaatcctcccttgaagaaccggatttttataaaactaaaatcaagctctgcatacttcttcatgctttcagaattcgggcagtgactattgatagagtgatgagctatctgaatgcttcctaagctagcttgactgactgagatacagcgtaccttcagctcacagacatgataagatacattgatgagtttggacaaaccacaactagaatgcagtgaaaaaaatgctttatttgtgaaatttgtgatgctattgctttatttgtaaccattataagctgcaataaacaagttaacaacaacaattgcattcattttatgtttcaggttcagggggaggtgtgggaggttttttaaagcaagtaaaacctctacaaatgtggtagtcgtcagctatcctgcaggaacttgtttatttgaaaatcaattcacaaaatccgagtagttattttgcctcccccttcccatttaacagaatacaccaatctctccccacgcacagctttaaacatttggataccattagatatagacatggttttagattccacattccaaacagtttcagagcgagccaatctggggtcagtgatagataaaaatccatcgggatagtcttttaaagcgctttcacagtccaactgctgcggatgcgactccggagtctggatcacggtcatctggaagaagaacgatgggaatcataatccgaaaacggtatcggacgattgtgtctcatcaaacccacaagcagccgctgtctgcgtcgctccgtgcgactgctgtttatgggatcagggtccacagtgtcctgaagcatgattttaatagcccttaacatcaactttctggtgcgatgcgcgcagcaacgcattctgatttcactcaaatctttgcagtaggtacaacacattattacaatattgtttaataaaccataattaaaagcgctccagccaaaactcatatctgatataatcgcccctgcatgaccatcataccaaagtttaatataaattaaatgacgttccctcaaaaacacactacccacatacatgatctcttttggcatgtgcatattaacaatctgtctgtaccatggacaacgttggttaatcatgcaacccaatataaccttccggaaccacactgccaacaccgctcccccagccatgcattgaagtgaaccctgctgattacaatgacaatgaagaacccaattctctcgaccgtgaatcacttgagaatgaaaaatatctatagtggcacaacatagacataaatgcatgcatcttctcataatttttaactcctcaggatttagaaacatatcccagggaataggaagctcttgcagaacagtaaagctggcagaacaaggaagaccacgaacacaacttacactatgcatagtcatagtatcacaatctggcaacagcgggtggtcttcagtcatagaagctcgggtttcattttcctcacaacgtggtaactgggctctggtgtaagggtgatgtctggcgcatgatgtcgagcgtgcgcgcaaccttgtcataatggagttgcttcctgacattctcgtattttgtatagcaaaacgcggccctggcagaacacactcttcttcgccttctatcctgccgcttagcgtgttccgtgtgatagttcaagtacaaccacactcttaagttggtcaaaagaatgctggcttcagttgtaatcaaaactccatcgcatctaatcgttctgaggaaatcatccaagcaatgcaactggattgtgtttcaagcaggagaggagagggaagagacggaagaaccatgttaatttttattccaaacgatctcgcagtacttcaaattgtagatcgcgcagatggcatctctcgcccccactgtgttggtgaaaaagcacagctagatcaaaagaaatgcgattttcaaggtgctcaacggtggcttccagcaaagcctccacgcgcacatccaagaacaaaagaataccaaaagaaggagcattttctaactcctcaatcatcatattacattcctgcaccattcccagataattttcagctttccagccttgaattattcgtgtcagttcttgtggtaaatccaatccacacattacaaacaggtcccggagggcgccctccaccaccattcttaaacacaccctcataatgacaaaatatcttgctcctgtgtcacctgtagcgaattgagaatggcaacatcaattgacatgcccttggctctaagttcttctttaagttctagttgtaaaaactctctcatattatcaccaaactgcttagccagaagccccccgggaacaagagcaggggacgctacagtgcagtacaagcgcagacctccccaattggctccagcaaaaacaagattggaataagcatattgggaaccgccagtaatatcatcgaagttgctggaaatataatcaggcagagtttcttgtaaaaattgaataaaagaaaaatttgccaaaaaaacattcaaaacctctgggatgcaaatgcaataggttaccgcgctgcgctccaacattgttagttttgaattagtctgcaaaaataaaaaaaaaaacaagcgtcatatcatagtagcctgacgaacagatggataaatcagtctttccatcacaagacaagccacagggtctccagctcgaccctcgtaaaacctgtcatcatgattaaacaacagcaccgaaagttcctcgcggtgaccagcatgaataattcttgatgaagcatacaatccagacatgttagcatcagttaacgagaaaaaacagccaacatagcctttgggtataattatgcttaatcgtaagtatagcaaagccacccctcgcggatacaaagtaaaaggcacaggagaataaaaaatataattatttctctgctgctgttcaggcaacgtcgcccccggtccctctaaatacacatacaaagcctcatcagccatggcttaccagacaaagtacagcgggcacacaaagcacaagctctaaagtgactctccaacctctccacaatatatatatacacaagccctaaactgacgtaatgggagtaaagtgtaaaaaatcccgccaaacccaacacacaccccgaaactgcgtcaccagggaaaagtacagtttcacttccgcaatcccaacaggcgtaacttcctctttctcacggtacgtgatatcccactaacttgcaacgtcattttcccacggtcgcaccgccccttttagccgttaaccccacagccaatcaccacacgatccacactttttaaaatcacctcatttacatattggcaccattccatctataaggtatattatatagataga

SEQ ID NO: 214 - DNA, 35344 bp, Artificial Sequence
  Genome sequence of NG-776 virus
tctatctatataatataccttatagatggaatggtgccaatatgtaaatgaggtgattttaaaaagtgtggatcgtgtggtgattggctgtggggttaacggctaaaaggggcggtgcgaccgtgggaaaatgacgttttgtgggggtggagtttttttgcaagttgtcgcgggaaatgtgacgcataaaaaggcttttttctcacggaactacttagttttcccacggtatttaacaggaaatgaggtagttttgaccggatgcaagtgaaaattgttgattttcgcgcgaaaactgaatgaggaagtgtttttctgaataatgtggtatttatggcagggtggagtatttgttcagggccaggtagactttgacccattacgtggaggtttcgattaccgtgttttttacctgaatttccgcgtaccgtgtcaaagtcttctgtttttacgtaggtgtcagctgatcgctagggtatttatacctcagggtttgtgtcaagaggccactcttgagtgccagcgagaagagttttctcctctgcgccggcagtttaataataaaaaaatgagagatttgcgatttctgcctcaggaaataatctctgctgagactggaaatgaaatattggagcttgtggtgcacgccctgatgggagacgatccggagccacctgtgcagctttttgagcctcctacgcttcaggaactgtatgatttagaggtagagggatcggaggattctaatgaggaagctgtaaatggcttttttaccgattctatgcttttagctgctaatgaagggttagaattagatccgcctttggacacttttgatactccaggggtaattgtggaaagcggtacaggtgtaagaaaattacctgatttgagttccgtggactgtgatttgcactgctatgaagacgggtttcctccgagtgatgaggaggaccatgaaaaggagcagtccatgcagactgcagcgggtgagggagtgaaggctgccaatgttggttttcagttggattgcccggagcttcctggacatggctgtaagtcttgtgaatttcacaggaaaaatactggagtaaaggaactgttatgttcgctttgttatatgagaacgcactgccactttatttacagtaagtgtgtttaagttaaaatttaaaggaatatgctgtttttcacatgtatattgagtgtgagttttgtgcttcttattataggtcctgtgtctgatgctgatgaatcaccatctcctgattctactacctcacctcctgagattcaagcacctgttcctgtggacgtgcgcaagcccattcctgtgaagcttaagcctgggaaacgtccagcagtggaaaaacttgaggacttgttacagggtggggacggacctttggacttgagtacacggaaacgtccaagacaataagtgttccatatccgtgtttacttaaggtgacgtcaatatttgtgtgacagtgcaatgtaataaaaatatgttaactgttcactggtttttattgctttttgggcggggactcaggtatataagtagaagcagacctgtgtggttagctcataggagctggctttcatccatggaggtttgggccattttggaagaccttaggaagactaggcaactgttagagaacgcttcggacggagtctccggtttttggagattctggttcgctagtgaattagctagggtagtttttaggataaaacaggactataaacaagaatttgaaaagttgttggtagattgcccaggactttttgaagctcttaatttgggccatcaggttcactttaaagaaaaagttttatcagttttagacttttcaaccccaggtagaactgctgctgctgtggcttttcttacttttatattagataaatggatcccgcagactcatttcagcaggggatacgttttggatttcatagccacagcattgtggagaacatggaaggttcgcaagatgaggacaatcttaggttactggccagtgcagcctttgggtgtagcgggaatcctgaggcatccaccggtcatgccagcggttctggaggaggaacagcaagaggacaacccgagagccggcctggaccctccagtggaggaggcggagtagctgacttgtctcctgaactgcaacgggtgcttactggatctacgtccactggacgggataggggcgttaagagggagagggcatctagtggtactgatgctagatctgagttggctttaagtttaatgagtcgcagacgtcctgaaaccatttggtggcatgaggttcagaaagagggaagggatgaagtttctgtattgcaggagaaatattcactggaacaggtgaaaacatgttggttggagcctgaggatgattgggaggtggccattaaaaattatgccaagatagctttgaggcctgataaacagtataagattactagacggattaatatccggaatgcttgttacatatctggaaatggggctgaggtggtaatagatactcaagacaaggcagttattagatgctgcatgatggatatgtggcctggggtagtcggtatggaagcagtaacttttgtaaatgttaagtttaggggagatggttataatggaatagtgtttatggccaataccaaacttatattgcatggttgtagcttttttggtttcaacaatacctgtgtagatgcctggggacaggttagtgtacggggatgtagtttctatgcgtgttggattgccacagctggcagaaccaagagtcaattgtctctgaagaaatgcatatttcaaagatgtaacctgggcattctgaatgaaggcgaagcaagggtccgccactgcgcttctacagatactggatgttttattttgattaagggaaatgccagcgtaaagcataacatgatttgcggtgcttccgatgagaggccttatcaaatgctcacttgtgctggtgggcattgtaatatgctggctactgtgcatattgtttcccatcaacgcaaaaaatggcctgtttttgatcacaatgtgatgacgaagtgtaccatgcatgcaggtgggcgtagaggaatgtttatgccttaccagtgtaacatgaatcatgtgaaagtgttgttggaaccagatgccttttccagaatgagcctaacaggaatttttgacatgaacatgcaaatctggaagatcctgaggtatgatgatacgagatcgagggtacgcgcatgcgaatgcggaggcaagcatgccaggttccagccggtgtgtgtagatgtgactgaagatctcagaccggatcatttggttattgcccgcactggagcagagttcggatccagtggagaagaaactgactaaggtgagtattgggaaaactttggggtgggattttcagatggacagattgagtaaaaatttgttttttctgtcttgcagctgtcatgagtggaaacgcttcttttaaggggggagtcttcagcccttatctgacagggcgtctcccatcctgggcaggagttcgtcagaatgttatgggatctactgtggatggaagacccgtccaacccgccaattcttcaacgctgacctatgctactttaagttcttcacctttggacgcagctgcagctgccgccgccgcttctgttgccgctaacactgtgcttggaatgggttactatggaagcatcatggctaattccacttcctctaataacccttctaccctgactcaggacaagttacttgtccttttggcccagctggaggctttgacccaacgtctgggtgaactttctcagcaggtggtcgagttgcgagtacaaactgagtctgctgtcggcacggcaaagtctaaataaaaaaatcccagaatcaatgaataaataaacaagcttgttgttgatttaaaatcaagtgtttttatttcatttttcgcgcacggtatgccctagaccaccgatctctatcattgagaactcggtggattttttccaggatcctatagaggtgggattgaatgtttagatacatgggcattaggccgtctttggggtggagatagctccattgaagggattcatgctccggggtagtgttgtaaatcacccagtcataacaaggtcgcagtgcatggtgttgcacaatatcttttagaagtaggctgattgccacagataagcccttggtgtaggtgtttacaaaccggttgagctgggatgggtgcattcggggtgaaattatgtgcattttggattggatttttaagttggcaatattgccgccaagatcccgtcttgggttcatgttatgaaggaccaccaagacggtgtatccggtacatttaggaaatttatcgtgcagcttggatggaaaagcgtggaaaaatttggagacacccttgtgtcctccaagattttccatgcactcatccatgataatagcaatggggccgtgggcagcggcgcgggcaaacacgttccgtgggtctgacacatcatagttatgttcctgagttaaatcatcataagccattttaatgaatttggggcggagagtaccagattggggtatgaatgttccttcgggccccggagcatagttcccctcacagatttgcatttcccaagctttcagttccgagggtggaatcatgtccacctggggggctatgaaaaacaccgtttctggggcgggggtgattaattgtgatgatagcaaatttctgagcaattgagatttgccacatccggtggggccataaatgattccgattacgggttgcaggtggtagtttagggaacggcaactgccgtcttctcgaagcaagggggccacctcgttcatcatttcccttacatgcatattttcccgcaccaaatccattaggaggcgctctcctcctagtgatagaagttcttgtagtgaggaaaagtttttcagcggtttcagaccgtcagccatgggcattttggagagagtttgctgcaaaagttctagtctgttccacagttcagtgatgtgttctatggcatctcgatccagcagacctcctcgtttcgcgggtttggacggctcctggaatagggtatgagacgatgggcgtccagcgctgccagggttcggtccttccagggtctcagtgttcgagtcagggttgtttccgtcacagtgaaggggtgtgcgcctgcttgggcgcttgccagggtgcgcttcagactcatcctgctggtcgaaaacttctgtcgcttggcgccctgtatgtcggccaagtagcagtttaccatgagttcgtagttgagcgcctcggctgcgtggcctttggcgcggagcttacctttggaagttttcttgcataccgggcagtataggcatttcagcgcatacaacttgggcgcaaggaaaacggattctggggagtatgcatctgcgccgcaggaggcgcaaacagtttcacattccaccagccaggttaaatccggttcattggggtcaaaaacaagttttccgccatattttttgatgcgtttcttacctttggtctccatgagttcgtgtcctcgttgagtgacaaacaggctgtccgtgtccccgtagactgattttacaggcctcttctccagtggagtgcctcggtcttcttcgtacaggaactctgaccactctgatacaaaggcgcgcgtccaggccagcacaaaggaggctatgtgggaggggtagcgatcgttgtcaaccagggggtccaccttttccaaagtatgcaaacacatgtcaccctcttcaacatccaggaatgtgattggcttgtaggtgtatttcacgtgacctggggtccccgctgggggggtataaaagggggcggttctttgctcttcctcactgtcttccggatcgctgtccaggaacgtcagctgttggggtaggtattccctctcgaaggcgggcatgacctctgcactcaggttgtcagtttctaagaacgaggaggatttgatattgacagtgccggttgagatgcctttcatgaggttttcgtccatctggtcagaaaacacaatttttttattgtcaagtttggtggcaaatgatccatacagggcgttggataaaagtttggcaatggatcgcatggtttggttcttttccttgtccgcgcgctctttggcggcgatgttgagttggacatactcgcgtgccaggcacttccattcggggaagatagttgttaattcatctggcacgattctcacttgccaccctcgattatgcaaggtaattaaatccacactggtggccacctcgcctcgaaggggttcattggtccaacagagcctacctcctttcctagaacagaaagggggaagtgggtctagcataagttcatcgggagggtctgcatccatggtaaagattcccggaagtaaatccttatcaaaatagctgatgggagtggggtcatctaaggccatttgccattctcgagctgccagtgcgcgctcatatgggttaaggggactgccccatggcatgggatgggtgagtgcagaggcatacatgccacagatgtcatagacgtagatgggatcctcaaagatgcctatgtaggttggatagcatcgcccccctctgatacttgctcgcacatagtcatatagttcatgtgatggcgctagcagccccggacccaagttggtgcgattgggtttttctgttctgtagacgatctggcgaaagatggcgtgagaattggaagagatggtgggtctttgaaaaatgttgaaatgggcatgaggtagacctacagagtctctgacaaagtgggcataagattcttgaagcttggttaccagttcggcggtgacaagtacgtctagggcgcagtagtcaagtgtttcttgaatgatgtcataacctggttggtttttcttttcccacagttcgcggttgagaaggtattcttcgcgatccttccagtactcttctagcggaaacccgtctttgtctgcacggtaagatcctagcatgtagaactgattaactgccttgtaagggcagcagcccttctctacgggtagagagtatgcttgagcagcttttcgtagcgaagcgtgagtaagggcaaaggtgtctctgaccatgactttgaggaattggtatttgaagtcgatgtcgtcacaggctccctgttcccagagttggaagtctacccgtttcttgtaggcggggttgggcaaagcgaaagtaacatcattgaagagaatcttgccggccctgggcatgaaattgcgagtgatgcgaaaaggctgtggtacttccgctcggttattgataacctgggcagctaggacgatctcgtcgaaaccgttgatgttgtgtcctacgatgtataattctatgaaacgcggcgtgcctctgacgtgaggtagcttactgagctcatcaaaggttaggtctgtggggtcagataaggcgtagtgttcgagagcccattcgtgcaggtgaggattcgctttaaggaaggaggaccagaggtccactgccagtgctgtttgtaactggtcccggtactgacgaaaatgccgtccgactgccattttttctggggtgacgcaatagaaggtttgggggtcctgccgccagcgatcccacttgagttttatggcgaggtcataggcgatgttgacgagccgctggtctccagagagtttcatgaccagcatgaaggggattagctgcttgccaaaggaccccatccaggtgtaggtttccacatcgtaggtgagaaagagcctttctgtgcgaggatgagagccaatcgggaagaactggatctcctgccaccagttggaggaatggctgttgatgtgatggaagtagaactccctgcgacgcgccgagcattcatgcttgtgcttgtacagacggccgcagtagtcgcagcgttgcacgggttgtatctcgtgaatgagttgtacctggcttcccttgacgagaaatttcagtgggaagccgaggcctggcgattgtatctcgtgctttactatgttgtctgcatcggcctgttcatcttctgtctcgatggtggtcatgctgacgagccctcgcgggaggcaagtccagacctcggcgcggcaggggcggagctcgaggacgagagcgcgcaggctggagctgtccagggtcctgagacgctgcggactcaggttagtaggcagtgtcaggagattaacttgcatgatcttttggagggcgtgcgggaggttcagatagtacttgatctcaacgggtccgttggtggagatgtcgatggcttgcagggttccgtgtcccttgggcgctaccaccgtgcccttgtttttcattttggacggcggtggctctgttgcttcttgcatgtttagaagcggtgtcgagggcgcgcaccgggcggcaggggcggctcgggacccggcggcatggctggcagtggtacgtcggcgccgcgcgcgggtaggttctggtactgcgccctgagaagactcgcatgcgcgacgacgcggcggttgacatcctggatctgacgcctctgggtgaaagctaccggccccgtgagcttgaacctgaaagagagttcaacagaatcaatctcggtatcgttgacggcggcttgcctaaggatttcttgcacgtcaccagagttgtcctggtaggcgatctccgccatgaactgctcgatctcttcctcttgaagatctccgcggcccgctctctcgacggtggccgcgaggtcgttggagatgcgcccaatgagttgagagaatgcattcatgcccgcctcgttccagacgcggctgtagaccacggcccccacgggatctctcgcgcgcatgaccacctgggcgaggttgagctccacgtggcgggtgaagaccgcatagttgcataggcgctggaaaaggtagttgagtgtggtggcgatgtgctcggtgacgaagaaatacatgatccatcgtctcagcggcatctcgctgacatcgcccagagcttccaagcgctccatggcctcgtagaagtccacggcaaaattaaaaaactgggagtttcgcgcggacacggtcaactcctcttccagaagacggataagttcggcgatggtggtgcgcacctcgcgctcgaaagcccctgggatttcttcctcaatctcttcttcttccactaacatctcttcctcttcaggtggggctgcaggaggagggggaacgcggcgacgccggcggcgcacgggcagacggtcgatgaatctttcaatgacctctccgcggcggcggcgcatggtttcagtgacggcgcggccgttctcgcgcggtcgcagagtaaaaacaccgccgcgcatctccttaaagtggtgactgggaggttctccgtttgggagggagagggcgctgattatacattttattaattggcccgtagggactgcacgcagagatctgatcgtgtcaagatccacgggatctgaaaacctttcgacgaaagcgtctaaccagtcacagtcacaaggtaggctgagtacggcttcttgtgggcgggggtggttatgtgttcggtctgggtcttctgtttcttcttcatctcgggaaggtgagacgatgctgctggtgatgaaattaaagtaggcagttctaagacggcggatggtggcgaggagcaccaggtctttgggtccggcttgctggatacgcaggcgattggccattccccaagcattatcctgacatctagcaagatctttgtagtagtcttgcatgagccgttctacgggcacttcttcctcacccgttctgccatgcatacgtgtgagtccaaatccgcgcattggttgtaccagtgccaagtcagctacgactctttcggcgaggatggcttgctgtacttgggtaagggtggcttgaaagtcatcaaaatccacaaagcggtggtaagctcctgtattaatggtgtaagcacagttggccatgactgaccagttaactgtctggtgaccagggcgcacgagctcggtgtatttaaggcgcgaataggcgcgggtgtcaaagatgtaatcgttgcaggtgcgcaccagatactggtaccctataagaaaatgcggcggtggttggcggtagagaggccatcgttctgtagctggagcgccaggggcgaggtcttccaacataaggcggtgatagccgtagatgtacctggacatccaggtgattcctgcggcggtagtagaagcccgaggaaactcgcgtacgcggttccaaatgttgcgtagcggcatgaagtagttcattgtaggcacggtttgaccagtgaggcgcgcgcagtcattgatgctctatagacacggagaaaatgaaagcgttcagcgactcgactccgtagcctggaggaacgtgaacgggttgggtcgcggtgtaccccggttcgagacttgtactcgagccggccggagccgcggctaacgtggtattggcactcccgtctcgacccagcctacaaaaatccaggatacggaatcgagtcgttttgctggtttccgaatggcagggaagtgagtcctattttttttttttgccgctcagatgcatcccgtgctgcgacagatgcgcccccaacaacagcccccctcgcagcagcagcagcagcaatcacaaaaggctgtccctgcaactactgcaactgccgccgtgagcggtgcgggacagcccgcctatgatctggacttggaagagggcgaaggactggcacgtctaggtgcgccttcacccgagcggcatccgcgagttcaactgaaaaaagattctcgcgaggcgtatgtgccccaacagaacctatttagagacagaagcggcgaggagccggaggagatgcgagcttcccgctttaacgcgggtcgtgagctgcgtcacggtttggaccgaagacgagtgttgcgggacgaggatttcgaagttgatgaaatgacagggatcagtcctgccagggcacacgtggctgcagccaaccttgtatcggcttacgagcagacagtaaaggaagagcgtaacttccaaaagtcttttaataatcatgtgcgaaccctgattgcccgcgaagaagttacccttggtttgatgcatttgtgggatttgatggaagctatcattcagaaccctactagcaaacctctgaccgcccagctgtttctggtggtgcaacacagcagagacaatgaggctttcagagaggcgctgctgaacatcaccgaacccgaggggagatggttgtatgatcttatcaacattctacagagtatcatagtgcaggagcggagcctgggcctggccgagaaggtggctgccatcaattactcggttttgagcttgggaaaatattacgctcgcaaaatctacaagactccatacgttcccatagacaaggaggtgaagatagatgggttctacatgcgcatgacgctcaaggtcttgaccctgagcgatgatcttggggtgtatcgcaatgacagaatgcatcgcgcggttagcgccagcaggaggcgcgagttaagcgacagggaactgatgcacagtttgcaaagagctctgactggagctggaaccgagggtgagaattacttcgacatgggagctgacttgcagtggcagcctagtcgcagggctctgagcgccgcgacggcaggatgtgagcttccttacatagaagaggcggatgaaggcgaggaggaagagggcgagtacttggaagactgatggcacaacccgtgttttttgctagatggaacagcaagcaccggatcccgcaatgcgggcggcgctgcagagccagccgtccggcattaactcctcggacgattggacccaggccatgcaacgtatcatggcgttgacgactcgcaaccccgaagcctttagacagcaaccccaggccaaccgtctatcggccatcatggaagctgtagtgccttcccgctctaatcccactcatgagaaggtcctggccatcgtgaacgcgttggtggagaacaaagctattcgtccagatgaggccggactggtatacaacgctctcttagaacgcgtggctcgctacaacagtagcaatgtgcaaaccaatttggaccgtatgataacagatgtacgcgaagccgtgtctcagcgcgaaaggttccagcgtgatgccaacctgggttcgctggtggcgttaaatgctttcttgagtactcagcctgctaatgtgccgcgtggtcaacaggattatactaactttttaagtgctttgagactgatggtatcagaagtacctcagagcgaagtgtatcagtccggtcctgattacttctttcagactagcagacagggcttgcagacggtaaatctgagccaagcttttaaaaaccttaaaggtttgtggggagtgcatgccccggtaggagaaagagcaaccgtgtctagcttgttaactccgaactcccgcctattattactgttggtagctcctttcaccgacagcggtagcatcgaccgtaattcctatttgggttacctactaaacctgtatcgcgaagccatagggcaaagtcaggtggacgagcagacctatcaagaaattacccaagtcagtcgcgctttgggacaggaagacactggcagtttggaagccactctgaacttcttgcttaccaatcggtctcaaaagatccctcctcaatatgctcttactgcggaggaggagaggatccttagatatgtgcagcagagcgtgggattgtttctgatgcaagagggggcaactccgactgcagcactggacatgacagcgcgaaatatggagcccagcatgtatgccagtaaccgacctttcattaacaaactgctggactacttgcacagagctgccgctatgaactctgattatttcaccaatgccatcttaaacccgcactggctgcccccacctggtttctacacgggcgaatatgacatgcccgaccctaatgacggatttctgtgggacgacgtggacagcgatgttttttcacctctttctgatcatcgcacgtggaaaaaggaaggcggcgatagaatgcattcttctgcatcgctgtccggggtcatgggtgctaccgcggctgagcccgagtctgcaagtccttttcctagtctacccttttctctacacagtgtacgtagcagcgaagtgggtagaataagtcgcccgagtttaatgggcgaagaggagtatctaaacgattccttgctcagaccggcaagagaaaaaaatttcccaaacaatggaatagaaagtttggtggataaaatgagtagatggaagacttatgctcaggatcacagagacgagcctgggatcatggggattacaagtagagcgagccgtagacgccagcgccatgacagacagaggggtcttgtgtgggacgatgaggattcggccgatgatagcagcgtgctggacttgggtgggagaggaaggggcaacccgtttgctcatttgcgccctcgcttgggtggtatgttgtaaaaaaaaataaaaaaaaaactcaccaaggccatggcgacgagcgtacgttcgttcttctttattatctgtgtctagtataatgaggcgagtcgtgctaggcggagcggtggtgtatccggagggtcctcctccttcgtacgagagcgtgatgcagcagcagcaggcgacggcggtgatgcaatccccactggaggctccctttgtgcctccgcgatacctggcacctacggagggcagaaacagcattcgttattcggaactggcacctcagtacgataccaccaggttgtatctggtggacaacaagtcggcggacattgcttctctgaactatcagaatgaccacagcaacttcttgaccacggtggtgcaaaacaatgactttacccctacggaagccagcacccagaccattaactttgatgaacgatcgcggtggggcggtcagctaaagaccatcatgcatactaacatgccaaacgtgaacgagtatatgtttagtaacaagttcaaagcgcgtgtgatggtgtccagaaaacctcccgacggtgctgcagttggggatacttatgatcacaagcaggatattttgaaatatgagtggttcgagtttactttgccagaaggcaacttttcagttactatgactattgatttgatgaacaatgccatcatagataattacttgaaagtgggtagacagaatggagtgcttgaaagtgacattggtgttaagttcgacaccaggaacttcaagctgggatgggatcccgaaaccaagttgatcatgcctggagtgtatacgtatgaagccttccatcctgacattgtcttactgcctggctgcggagtggattttaccgagagtcgtttgagcaaccttcttggtatcagaaaaaaacagccatttcaagagggttttaagattttgtatgaagatttagaaggtggtaatattccggccctcttggatgtagatgcctatgagaacagtaagaaagaacaaaaagccaaaatagaagctgctacagctgctgcagaagctaaggcaaacatagttgccagcgactctacaagggttgctaacgctggagaggtcagaggagacaattttgcgccaacacctgttccgactgcagaatcattattggccgatgtgtctgaaggaacggacgtgaaactcactattcaacctgtagaaaaagatagtaagaatagaagctataatgtgttggaagacaaaatcaacacagcctatcgcagttggtatctttcgtacaattatggcgatcccgaaaaaggagtgcgttcctggacattgctcaccacctcagatgtcacctgcggagcagagcaggtctactggtcgcttccagacatgatgaaggatcctgtcactttccgctccactagacaagtcagtaactaccctgtggtgggtgcagagcttatgcccgtcttctcaaagagcttctacaacgaacaagctgtgtactcccagcagctccgccagtccacctcgcttacgcacgtcttcaaccgctttcctgagaaccagattttaatccgtccgccggcgcccaccattaccaccgtcagtgaaaacgttcctgctctcacagatcacgggaccctgccgttgcgcagcagtatccggggagtccaacgtgtgaccgttactgacgccagacgccgcacctgtccctacgtgtacaaggcactgggcatagtcgcaccgcgcgtcctttcaagccgcactttctaaaaaaaaaaaaaatgtccattcttatctcgcccagtaataacaccggttggggtctgcgcgctccaagcaagatgtacggaggcgcacgcaaacgttctacccaacatcctgtccgtgttcgcggacattttcgcgctccatggggcgccctcaagggccgcactcgcgttcgaaccaccgtcgatgatgtaatcgatcaggtggttgccgacgcccgtaattatactcctactgcgcctacatctactgtggatgcagttattgacagtgtagtggctgacgctcgcaactatgctcgacgtaagagccggcgaaggcgcattgccagacgccaccgagctaccactgccatgcgagccgcaagagctctgctacgaagagctagacgcgtggggcgaagagccatgcttagggcggccagacgtgcagcttcgggcgccagcgccggcaggtcccgcaggcaagcagccgctgtcgcagcggcgactattgccgacatggcccaatcgcgaagaggcaatgtatactgggtgcgtgacgctgccaccggtcaacgtgtacccgtgcgcacccgtccccctcgcacttagaagatactgagcagtctccgatgttgtgtcccagcggcgaggatgtccaagcgcaaatacaaggaagaaatgctgcaggttatcgcacctgaagtctacggccaaccgttgaaggatgaaaaaaaaccccgcaaaatcaagcgggttaaaaaggacaaaaaagaagaggaagatggcgatgatgggctggcggagtttgtgcgcgagtttgccccacggcgacgcgtgcaatggcgtgggcgcaaagttcgacatgtgttgagacctggaacttcggtggtctttacacccggcgagcgttcaagcgctacttttaagcgttcctatgatgaggtgtacggggatgatgatattcttgagcaggcggctgaccgattaggcgagtttgcttatggcaagcgtagtagaataacttccaaggatgagacagtgtcgatacccttggatcatggaaatcccacccctagtcttaaaccggtcactttgcagcaagtgttacccgtaactccgcgaacaggtgttaaacgcgaaggtgaagatttgtatcccactatgcaactgatggtacccaaacgccagaagttggaggacgttttggagaaagtaaaagtggatccagatattcaacctgaggttaaagtgagacccattaagcaggtagcgcctggtctgggggtacaaactgtagacattaagattcccactgaaagtatggaagtgcaaactgaacccgcaaagcctactgccacctccactgaagtgcaaacggatccatggatgcccatgcctattacaactgacgccgccggtcccactcgaagatcccgacgaaagtacggtccagcaagtctgttgatgcccaattatgttgtacacccatctattattcctactcctggttaccgaggcactcgctactatcgcagccgaaacagtacctcccgccgtcgccgcaagacacctgcaaatcgcagtcgtcgccgtagacgcacaagcaaaccgactcccggcgccctggtgcggcaagtgtaccgcaatggtagtgcggaacctttgacactgccgcgtgcgcgttaccatccgagtatcatcacttaatcaatgttgccgctgcctccttgcagatatggccctcacttgtcgccttcgcgttcccatcactggttaccgaggaagaaactcgcgccgtagaagagggatgttgggacgcggaatgcgacgctacaggcgacggcgtgctatccgcaagcaattgcggggtggttttttaccagccttaattccaattatcgctgctgcaattggcgcgataccaggcatagcttccgtggcggttcaggcctcgcaacgacattgacattggaaaaaaacgtataaataaaaaaaaaaaaatacaatggactctgacactcctggtcctgtgactatgttttcttagagatggaagacatcaatttttcatccttggctccgcgacacggcacgaagccgtacatgggcacctggagcgacatcggcacgagccaactgaacgggggcgccttcaattggagcagtatctggagcgggcttaaaaattttggctcaaccataaaaacatacgggaacaaagcttggaacagcagtacaggacaggcgcttagaaataaacttaaagaccagaacttccaacaaaaagtagtcgatgggatagcttccggcatcaatggagtggtagatttggctaaccaggctgtgcagaaaaagataaacagtcgtttggacccgccgccagcaaccccaggtgaaatgcaagtggaggaagaaattcctccgccagaaaaacgaggcgacaagcgtccgcgtcccgatttggaagagacgctggtgacgcgcgtagatgaaccgccttcttatgaggaagcaacgaagcttggaatgcccaccactagaccgatagccccaatggccaccggggtgatgaaaccttctcagttgcatcgacccgtcaccttggatttgccccctccccctgctgctactgctgtacccgcttctaagcctgtcgctgccccgaaaccagtcgccgtagccaggtcacgtcccgggggcgctcctcgtccaaatgcgcactggcaaaatactctgaacagcatcgtgggtctaggcgtgcaaagtgtaaaacgccgtcgctgcttttaattaaatatggagtagcgcttaacttgcctatctgtgtatatgtgtcattacacgccgtcacagcagcagaggaaaaaaggaagaggtcgtgcgtcgacgctgagttactttcaagatggccaccccatcgatgctgccccaatgggcatacatgcacatcgccggacaggatgcttcggagtacctgagtccgggtctggtgcagttcgcccgcgccacagacacctacttcaatctgggaaataagtttagaaatcccaccgtagcgccgacccacgatgtgaccaccgaccgtagccagcggctcatgttgcgcttcgtgcccgttgaccgggaggacaatacatactcttacaaagtgcggtacaccctggccgtgggcgacaacagagtgctggatatggccagcacgttctttgacattaggggtgtgttggacagaggtcccagtttcaaaccctattctggtacggcttacaactccctggctcctaaaggcgctccaaatacatctcagtggattgcagaaggtgtaaaaaatacaactggtgaggaacacgtaacagaagaggaaaccaatactactacttacacttttggcaatgctcctgtaaaagctgaagctgaaattacaaaagaaggactcccagtaggtttggaagtttcagatgaagaaagtaaaccgatttatgctgataaaacatatcagccagaacctcagctgggagatgaaacttggactgaccttgatggaaaaaccgaaaagtatggaggcagggctctcaaacccgatactaagatgaaaccatgctacgggtcctttgccaaacctactaatgtgaaaggcggtcaggcaaaacaaaaaacaacggagcagccaaatcagaaagtcgaatatgatatcgacatggagttttttgatgcggcatcgcagaaaacaaacttaagtcctaaaattgtcatgtatgcagaaaatgtaaatttggaaactccagacactcatgtagtgtacaaacctggaacagaagacacaagttccgaagctaatttgggacaacaatctatgcccaacagacccaactacattggcttcagagataactttattggacttatgtactataacagtactggtaacatgggggtgctggctggtcaagcgtctcagttaaatgcagtggttgacttgcaggacagaaacacagaactttcttaccaactcttgcttgactctctgggcgacagaaccagatactttagcatgtggaatcaggctgtggacagttatgatcctgatgtacgtgttattgaaaatcatggtgtggaagatgaacttcccaactactgttttccactggacggcataggtgttccaacaaccagttacaaatcaatagttccaaatggagacaatgcgcctaattggaaggaacctgaagtaaatggaacaagtgagatcggacagggtaatttgtttgccatggaaattaaccttcaagccaatctatggcgaagtttcctttattccaatgtggctctatatctcccagactcgtacaaatacaccccgtccaatgtcactcttccagaaaacaaaaacacctacgactacatgaacgggcgggtggtgccgccatctctagtagacacctatgtgaacattggtgccaggtggtctctggatgccatggacaatgtcaacccattcaaccaccaccgtaacgctggcttgcgttaccgatccatgcttctgggtaacggacgttatgtgcctttccacatacaagtgcctcaaaaattcttcgctgttaaaaacctgctgcttctcccaggctcctacacttatgagtggaactttaggaaggatgtgaacatggttctacagagttccctcggtaacgacctgcgggtagatggcgccagcatcagtttcacgagcatcaacctctatgctacttttttccccatggctcacaacaccgcttccacccttgaagccatgctgcggaatgacaccaatgatcagtcattcaacgactacctatctgcagctaacatgctctaccccattcctgccaatgcaaccaatattcccatttccattccttctcgcaactgggcggctttcagaggctggtcatttaccagactgaaaaccaaagaaactccctctttggggtctggatttgacccctactttgtctattctggttctattccctacctggatggtaccttctacctgaaccacacttttaagaaggtttccatcatgtttgactcttcagtgagctggcctggaaatgacaggttactatctcctaacgaatttgaaataaagcgcactgtggatggcgaaggctacaacgtagcccaatgcaacatgaccaaagactggttcttggtacagatgctcgccaactacaacatcggctatcagggcttctacattccagaaggatacaaagatcgcatgtattcatttttcagaaacttccagcccatgagcaggcaggtggttgatgaggtcaattacaaagacttcaaggccgtcgccataccctaccaacacaacaactctggctttgtgggttacatggctccgaccatgcgccaaggtcaaccctatcccgctaactatccctatccactcattggaacaactgccgtaaatagtgttacgcagaaaaagttcttgtgtgacagaaccatgtggcgcataccgttctcgagcaacttcatgtctatgggggcccttacagacttgggacagaatatgctctatgccaactcagctcatgctctggacatgacctttgaggtggatcccatggatgagcccaccctgctttatcttctcttcgaagttttcgacgtggtcagagtgcatcagccacaccgcggcatcatcgaggcagtctacctgcgtacaccgttctcggccggtaacgctaccacgtaagaagcttcttgcttcttgcaaatagcagctgcaaccatggcctgcggatcccaaaacggctccagcgagcaagagctcagagccattgtccaagacctgggttgcggaccctattttttgggaacctacgataagcgcttcccggggttcatggcccccgataagctcgcctgtgccattgtaaatacggccggacgtgagacggggggagagcactggttggctttcggttggaacccacgttctaacacctgctacctttttgatccttttggattctcggatgatcgtctcaaacagatttaccagtttgaatatgagggtctcctgcgccgcagcgctcttgctaccaaggaccgctgtattacgctggaaaaatctacccagaccgtgcagggtccccgttctgccgcctgcggacttttctgctgcatgttccttcacgcctttgtgcactggcctgaccgtcccatggacggaaaccccaccatgaaattgctaactggagtgccaaacaacatgcttcattctcctaaagtccagcccaccctgtgtgacaatcaaaaagcactctaccattttcttaatacccattcgccttattttcgctcccatcgtacacacatcgaaagggccactgcgttcgaccgtatggatgttcaataatgactcatgtaaacaacgtgttcaataaacatcactttatttttttacatgtatcaaggctctgcattacttatttatttacaagtcgaatgggttctgacgagaatcagaatgacccgcaggcagtgatacgttgcggaactgatacttgggttgccacttgaattcgggaatcaccaacttgggaaccggtatatcgggcaggatgtcactccacagctttctggtcagctgcaaagctccaagcaggtcaggagccgaaatcttgaaatcacaattaggaccagtgctttgagcgcgagagttgcggtacaccggattgcagcactgaaacaccatcagcgacggatgtctcacgcttgccagcacggtgggatctgcaatcatgcccacatccagatcttcagcattggcaatgctgaacggggtcatcttgcaggtctgcctacccatggcgggcacccaattaggcttgtggttgcaatcgcagtgcagggggatcagtatcatcttggcctgatcctgtctgattcctggatacacggctctcatgaaagcatcatattgcttgaaagcctgctgggctttactaccctcggtataaaacatcccgcaggacctgctcgaaaactggttagctgcacagccggcatcattcacacagcagcgggcgtcattgttagctatttgcaccacacttctgccccagcggttttgggtgattttggttcgctcgggattctcctttaaggctcgttgtccgttctcgctggccacatccatctcgataatctgctccttctgaatcataatattgccatgcaggcacttcagcttgccctcataatcattgcagccatgaggccacaacgcacagcctgtacattcccaattatggtgggcgatctgagaaaaagaatgtatcattccctgcagaaatcttcccatcatcgtgctcagtgtcttgtgactagtgaaagttaactggatgcctcggtgctcctcgtttacgtactggtgacagatgcgcttgtattgttcgtgttgctcaggcattagtttaaaagaggttctaagttcgttatccagcctgtacttctccatcagcagacacatcacttccatgcctttctcccaagcagacaccaggggcaagctaatcggattcttaacagtgcaggcagcagctcctttagccagagggtcatctttagcgatcttctcaatgcttcttttgccatccttctcaacgatgcgcacgggcgggtagctgaaacccactgctacaagttgcgcctcttctctttcttcttcgctgtcttgactgatgtcttgcatggggatatgtttggtcttccttggcttctttttggggggtatcggaggaggaggactgtcgctccgttccggagacagggaggattgtgacgtttcgctcaccattaccaactgactgtcggtagaagaacctgaccccacacggcgacaggtgtttctcttcgggggcagaggtggaggcgattgcgaagggctgcggtccgacctggaaggcggatgactggcagaaccccttccgcgttcgggggtgtgctccctgtggcggtcgcttaactgatttccttcgcggctggccattgtgttctcctaggcagagaaacaacagacatggaaactcagccattgctgtcaacatcgccacgagtgccatcacatctcgtcctcagcgacgaggaaaaggagcagagcttaagcattccaccgcccagtcctgccaccacctctaccctagaagataaggaggtcgacgcatctcatgacatgcagaataaaaaagcgaaagagtctgagacagacatcgagcaagacccgggctatgtgacaccggtggaacacgaggaagagttgaaacgctttctagagagagaggatgaaaactgcccaaaacaacgagcagataactatcaccaagatgctggaaatagggatcagaacaccgactacctcatagggcttgacggggaagacgcgctccttaaacatctagcaagacagtcgctcatagtcaaggatgcattattggacagaactgaagtgcccatcagtgtggaagagctcagccgcgcctacgagcttaacctcttttcacctcgtactccccccaaacgtcagccaaacggcacctgcgagccaaatcctcgcttaaacttttatccagcttttgctgtgccagaagtactggctacctatcacatcttttttaaaaatcaaaaaattccagtctcctgccgcgctaatcgcacccgcgccgatgccctactcaatctgggacctggttcacgcttacctgatatagcttccttggaagaggttccaaagatcttcgagggtctgggcaataatgagactcgggccgcaaatgctctgcaaaagggagaaaatggcatggatgagcatcacagcgttctggtggaattggaaggcgataatgccagactcgcagtactcaagcgaagcatcgaggtcacacacttcgcatatcccgctgtcaacctgccccctaaagtcatgacggcggtcatggaccagttactcattaagcgcgcaagtcccctttcagaagacatgcatgacccagatgcctgtgatgagggtaaaccagtggtcagtgatgagcagctaacccgatggctgggcaccgactctcccagggatttggaagagcgtcgcaagcttatgatggccgtggtgctggttaccgtagaactagagtgtctccgacgtttctttaccgattcagaaaccttgcgcaaactcgaagagaatctgcactacacttttagacacggctttgtgcggcaggcatgcaagatatctaacgtggaactcaccaacctggtttcctacatgggtattctgcatgagaatcgcctaggacaaagcgtgctgcacagcaccctgaagggggaagcccgccgtgattacatccgcgattgtgtctatctgtacctgtgccacacgtggcaaaccggcatgggtgtatggcagcaatgtttagaagaacagaacttgaaagagcttgacaagctcttacagaaatctcttaaggttctgtggacagggttcgacgagcgcaccgtcgcttccgacctggcagacctcatcttcccagagcgtctcagggttactttgcgaaacggattgcctgactttatgagccagagcatgcttaacaattttcgctctttcatcctggaacgctccggtatcctgcccgccacctgctgcgcactgccctccgactttgtgcctctcacctaccgcgagtgccccccgccgctatggagtcactgctacctgttccgtctggccaactatctctcctaccactcggatgtgatcgaggatgtgagcggagacggcttgctggagtgtcactgccgctgcaatctgtgcacgccccaccggtccctagcttgcaacccccagttgatgagcgaaacccagataataggcacctttgaattgcaaggccccagcagccaaggcgatgggtcttctcctgggcaaagtttaaaactgaccccgggactgtggacctccgcctacttgcgcaagtttgctccggaagattaccacccctatgaaatcaagttctatgaggaccaatcacagcctccaaaggccgaactttcggcctgcgtcatcacccagggggcaattctggcccaattgcaagccatccaaaaatcccgccaagaatttctactgaaaaagggtaagggggtctaccttgacccccagaccggcgaggaactcaacacaaggttccctcaggatgtcccaacgacgagaaaacaagaagttgaaggtgcagccgccgcccccagaagatatggaggaagattgggacagtcaggcagaggaggcggaggaggacagtctggaggacagtctggaggaagacagtttggaggaggaaaacgaggaggcagaggaggtggaagaagtaaccgccgacaaacagttatcctcggctgcggagacaagcaacagcgctaccatctccgctccgagtcgaggaacccggcggcgtcccagcagtagatgggacgagaccggacgcttcccgaacccaaccagcgcttccaagaccggtaagaaggatcggcagggatacaagtcctggcgggggcataagaatgccatcatctcctgcttgcatgagtgcgggggcaacatatccttcacgcggcgctacttgctattccaccatggggtgaactttccgcgcaatgttttgcattactaccgtcacctccacagcccctactatagccagcaaatcccggcagtctcgacagataaagacagcggcggcgacctccaacagaaaaccagcagcggcagttagaaaatacacaacaagtgcagcaacaggaggattaaagattacagccaacgagccagcgcaaacccgagagttaagaaatcggatctttccaaccctgtatgccatcttccagcagagtcggggtcaagagcaggaactgaaaataaaaaaccgatctctgcgttcgctcaccagaagttgtttgtatcacaagagcgaagatcaacttcagcgcactctcgaggacgccgaggctctcttcaacaagtactgcgcgctgactcttaaagagtaggcagcgaccgcgcttattcaaaaaaggcgggaattacatcatcctcgacatgagtaaagaaattcccacgccttacatgtggagttatcaaccccaaatgggattggcggcaggcgcctcccaggactactccacccgcatgaattggctcagcgccgggccttctatgatttctcgagttaatgatatacgcgcctaccgaaaccaaatacttttggaacagtcagctcttaccaccacgccccgccaacaccttaatcccagaaattggcccgccgccctagtgtaccaggaaagtcccgctcccaccactgtattacttcctcgagacgcccaggccgaagtccaaatgactaatgcaggtgcgcagttagctggcggctccaccctatgtcgtcacaggcctcggcataatataaaacgcctgatgatcagaggccgaggtatccagctcaacgacgagtcggtgagctctccgcttggtctacgaccagacggaatctttcagattgccggctgcgggagatcttccttcacccctcgtcaggctgttctgactttggaaagttcgtcttcgcaaccccgctcgggcggaatcgggaccgttcaatttgtggaggagtttactccctctgtctacttcaaccccttctccggatctcctgggcattacccggacgagttcataccgaacttcgacgcgattagcgagtcagtggacggctacgattgatgtctggtgacgcggctgagctatctcggctgcgacatctagaccactgccgccgctttcgctgctttgcccgggaactcattgagttcatctacttcgaactccccaaggatcaccctcaaggtccggcccacggagtgcggatttctatcgaaggcaaaatagactctcgcctgcaacgaattttctcccagcggcccgtgctgatcgagcgagaccagggaaacaccacggtttccatctactgcatttgtaatcaccccggattgcatgaaagcctttgctgtcttatgtgtactgagtttaataaaaactgaattaagactctcctacggactgccgcttcttcaacccggattttacaaccagaagaacgaaacttttcctgtcgtccaggactctgttaacttcacctttcctactcacaaactagaagctcaacgactacaccgcttttccagaagcattttccctactaatactactttcaaaaccggaggtgagctccaaggtcttcctacagaaaacccttgggtggaagcgggccttgtagtgctaggaattcttgcgggtgggcttgtgattattctttgctacctatacacaccttgcttcactttcttagtggtgttgtggtattggtttaaaaaatggggcccatactagtcttgcttgttttactttcgcttttggaaccgggttctgccaattacgatccatgtctagacttcgacccagaaaactgcacacttacttttgcacccgacacaagccgcatctgtggagttcatcgcctctcttacgaacttggcccccaacgacaaaaatttacctgcatggtgggaatcaaccccatagttatcacccagcaaagtggagatactaagggttgcattcactgctcctgcgattccatcgagtgcacctacaccctgctgaagaccctatgcggcctaagagacctgctaccaatgaattaaaaaatgattaataaaaaatcacttacttgaaatcagcaataaggtctctgttgaaattttctcccagcagcacctcacttccctcttcccaactctggtattctaaaccccgttcagcggcatactttctccatactttaaaggggatgtcaaattttagctcctctcctgtacccacaatcttcatgtctttcttcccagatgaccaagagagtccggctcagtgactccttcaaccctgtctacccctatgaagatgaaagcacctcccaacacccctttataaacccagggtttatttccccaaatggcttcacacaaagcccaaacggagttcttactttaaaatgtttaaccccactaacaaccacaggcggatctctacagctaaaagtgggagggggacttacagtggatgacaccaacggttttttgaaagaaaacataagtgccaccacaccactcgttaagactggtcactctataggtttaccactaggagccggattgggaacgaatgaaaataaactttgtatcaaattaggacaaggacttacattcaattcaaacaacatttgcattgatgacaatattaacaccttatggacaggagtcaaccccaccgaagccaactgtcaaatcatgaactccagtgaatctaatgattgcaaattaattctaacactagttaaaactggagcactagtcactgcatttgtttatgttataggagtatctaacaattttaatatgctaactacacacagaaatataaattttactgcagagctgtttttcgattctactggtaatttactaactagactctcatccctcaaaactccacttaatcataaatcaggacaaaacatggctactggtgccattactaatgctaaaggtttcatgcccagcacgactgcctatcctttcaatgataattctagagaaaaagaaaactacatttacggaacttgttactacacagctagtgatcgcactgcttttcccattgacatatctgtcatgcttaaccgaagagcaataaatgacgagacatcatattgtattcgtataacttggtcctggaacacaggagatgccccagaggtgcaaacctctgctacaaccctagtcacctccccatttaccttttactacatcagagaagacgactgacaaataaagtttgcgatcgccaggcccaccatgtacaggatgcaactcctgtcttgcattgcactaagtcttgcacttgtcacaaacagtaactgggtgaatgtaataagtgatttgaaaaaaattgaagatcttattcaatctatgcatattgatgctactttatatacggaaagtgatgttcaccccagttgcaaagtaacagcaatgaagtgctttctcttggagttacaagttatttcacttgagtccggagatgcaagtattcatgatacagtagaaaatctgatcatcctagcaaacaacagtttgtcttctaatgggaatgtaacagaatctggatgcaaagaatgtgaggaactggaggaaaaaaatattaaagaatttttgcagagttttgtacatattgtccaaatgttcatcaacacttctggaagcggagagggcagaggaagtctgctaacatgcggtgacgtcgaggagaatcctggacctgccttgacctttgctttactggtggccctcctggtgctcagctgcaagtcaagctgctctgtgggctgtgatctgcctcaaacccacagcctgggtagcaggaggaccttgatgctcctggcacagatgaggagaatctctcttttctcctgcttgaaggacagacatgactttggatttccccaggaggagtttggcaaccagttccaaaaggctgaaaccatccctgtcctccatgagatgatccagcagatcttcaatctcttcagcacaaaggactcatctgctgcttgggatgagaccctcctagacaaattctacactgaactctaccagcagctgaatgacctggaagcctgtgtgatacagggggtgggggtgacagagactcccctgatgaaggaggactccattctggctgtgaggaaatacttccaaagaatcactctctatctgaaagagaagaaatacagcccttgtgcctgggaggttgtcagagcagaaatcatgagatctttttctttgtcaacaaacttgcaagaaagtttaagaagtaaggaaggaagcggacagtgtactaattatgctctcttgaaattggctggagatgttgagagcaaccctggacctatgtgtcaccagcagttggtcatctcttggttttccctggtttttctggcatctcccctcgtggccatatgggaactgaagaaagatgtttatgtcgtagaattggattggtatccggatgcccctggagaaatggtggtcctcacctgtgacacccctgaagaagatggtatcacctggaccttggaccagagcagtgaggtcttaggctctggcaaaaccctgaccatccaagtcaaagagtttggagatgctggccagtacacctgtcacaaaggaggcgaggttctaagccattcgctcctgctgcttcacaaaaaggaagatggaatttggtccactgatattttaaaggaccagaaagaacccaaaaataagacctttctaagatgcgaggccaagaattattctggacgtttcacctgctggtggctgacgacaatcagtactgatttgacattcagtgtcaaaagcagcagaggctcttctgacccccaaggggtgacgtgcggagctgctacactctctgcagagagagtcagaggggacaacaaggagtatgagtactcagtggagtgccaggaggacagtgcctgcccagctgctgaggagagtctgcccattgaggtcatggtggatgccgttcacaagctcaagtatgaaaactacaccagcagcttcttcatcagggacatcatcaaacctgacccacccaagaacttgcagctgaagccattaaagaattctcggcaggtggaggtcagctgggagtaccctgacacctggagtactccacattcctacttctccctgacattctgcgttcaggtccagggcaagagcaagagagaaaagaaagatagagtcttcacggacaagacctcagccacggtcatctgccgcaaaaatgccagcattagcgtgcgggcccaggaccgctactatagctcatcttggagcgaatgggcatctgtgccctgcagtggagggggcggcagcgggggaggcggcagcggcggcgggggatcgagaaacctccccgtggccactccagacccaggaatgttcccatgccttcaccactcccaaaacctgctgagggccgtcagcaacatgctccagaaggccagacaaactctagaattttacccttgcacttctgaagagattgatcatgaagatatcacaaaagataaaaccagcacagtggaggcctgtttaccattggaattaaccaagaatgagagttgcctaaattccagagagacctctttcataactaatgggagttgcctggcctccagaaagacctcttttatgatggccctgtgccttagtagtatttatgaagacttgaagatgtaccaggtggagttcaagaccatgaatgcaaagcttctgatggatcctaagaggcagatctttctagatcaaaacatgctggcagttattgatgagctgatgcaggccctgaatttcaacagtgagactgtgccacaaaaatcctcccttgaagaaccggatttttataaaactaaaatcaagctctgcatacttcttcatgctttcagaattcgggcagtgactattgatagagtgatgagctatctgaatgcttcctaagctagcttgactgactgagatacagcgtaccttcagctcacagacatgataagatacattgatgagtttggacaaaccacaactagaatgcagtgaaaaaaatgctttatttgtgaaatttgtgatgctattgctttatttgtaaccattataagctgcaataaacaagttaacaacaacaattgcattcattttatgtttcaggttcagggggaggtgtgggaggttttttaaagcaagtaaaacctctacaaatgtggtagtcgtcagctatcctgcaggaacttgtttatttgaaaatcaattcacaaaatccgagtagttattttgcctcccccttcccatttaacagaatacaccaatctctccccacgcacagctttaaacatttggataccattagatatagacatggttttagattccacattccaaacagtttcagagcgagccaatctggggtcagtgatagataaaaatccatcgggatagtcttttaaagcgctttcacagtccaactgctgcggatgcgactccggagtctggatcacggtcatctggaagaagaacgatgggaatcataatccgaaaacggtatcggacgattgtgtctcatcaaacccacaagcagccgctgtctgcgtcgctccgtgcgactgctgtttatgggatcagggtccacagtgtcctgaagcatgattttaatagcccttaacatcaactttctggtgcgatgcgcgcagcaacgcattctgatttcactcaaatctttgcagtaggtacaacacattattacaatattgtttaataaaccataattaaaagcgctccagccaaaactcatatctgatataatcgcccctgcatgaccatcataccaaagtttaatataaattaaatgacgttccctcaaaaacacactacccacatacatgatctcttttggcatgtgcatattaacaatctgtctgtaccatggacaacgttggttaatcatgcaacccaatataaccttccggaaccacactgccaacaccgctcccccagccatgcattgaagtgaaccctgctgattacaatgacaatgaagaacccaattctctcgaccgtgaatcacttgagaatgaaaaatatctatagtggcacaacatagacataaatgcatgcatcttctcataatttttaactcctcaggatttagaaacatatcccagggaataggaagctcttgcagaacagtaaagctggcagaacaaggaagaccacgaacacaacttacactatgcatagtcatagtatcacaatctggcaacagcgggtggtcttcagtcatagaagctcgggtttcattttcctcacaacgtggtaactgggctctggtgtaagggtgatgtctggcgcatgatgtcgagcgtgcgcgcaaccttgtcataatggagttgcttcctgacattctcgtattttgtatagcaaaacgcggccctggcagaacacactcttcttcgccttctatcctgccgcttagcgtgttccgtgtgatagttcaagtacaaccacactcttaagttggtcaaaagaatgctggcttcagttgtaatcaaaactccatcgcatctaatcgttctgaggaaatcatccaagcaatgcaactggattgtgtttcaagcaggagaggagagggaagagacggaagaaccatgttaatttttattccaaacgatctcgcagtacttcaaattgtagatcgcgcagatggcatctctcgcccccactgtgttggtgaaaaagcacagctagatcaaaagaaatgcgattttcaaggtgctcaacggtggcttccagcaaagcctccacgcgcacatccaagaacaaaagaataccaaaagaaggagcattttctaactcctcaatcatcatattacattcctgcaccattcccagataattttcagctttccagccttgaattattcgtgtcagttcttgtggtaaatccaatccacacattacaaacaggtcccggagggcgccctccaccaccattcttaaacacaccctcataatgacaaaatatcttgctcctgtgtcacctgtagcgaattgagaatggcaacatcaattgacatgcccttggctctaagttcttctttaagttctagttgtaaaaactctctcatattatcaccaaactgcttagccagaagccccccgggaacaagagcaggggacgctacagtgcagtacaagcgcagacctccccaattggctccagcaaaaacaagattggaataagcatattgggaaccgccagtaatatcatcgaagttgctggaaatataatcaggcagagtttcttgtaaaaattgaataaaagaaaaatttgccaaaaaaacattcaaaacctctgggatgcaaatgcaataggttaccgcgctgcgctccaacattgttagttttgaattagtctgcaaaaataaaaaaaaaaacaagcgtcatatcatagtagcctgacgaacagatggataaatcagtctttccatcacaagacaagccacagggtctccagctcgaccctcgtaaaacctgtcatcatgattaaacaacagcaccgaaagttcctcgcggtgaccagcatgaataattcttgatgaagcatacaatccagacatgttagcatcagttaacgagaaaaaacagccaacatagcctttgggtataattatgcttaatcgtaagtatagcaaagccacccctcgcggatacaaagtaaaaggcacaggagaataaaaaatataattatttctctgctgctgttcaggcaacgtcgcccccggtccctctaaatacacatacaaagcctcatcagccatggcttaccagacaaagtacagcgggcacacaaagcacaagctctaaagtgactctccaacctctccacaatatatatatacacaagccctaaactgacgtaatgggagtaaagtgtaaaaaatcccgccaaacccaacacacaccccgaaactgcgtcaccagggaaaagtacagtttcacttccgcaatcccaacaggcgtaacttcctctttctcacggtacgtgatatcccactaacttgcaacgtcattttcccacggtcgcaccgccccttttagccgttaaccccacagccaatcaccacacgatccacactttttaaaatcacctcatttacatattggcaccattccatctataaggtatattatatagataga

SEQ ID NO: 215 - DNA, 35347 bp, Artificial Sequence
  Genome sequence of NG-777 virus
tctatctatataatataccttatagatggaatggtgccaatatgtaaatgaggtgattttaaaaagtgtggatcgtgtggtgattggctgtggggttaacggctaaaaggggcggtgcgaccgtgggaaaatgacgttttgtgggggtggagtttttttgcaagttgtcgcgggaaatgtgacgcataaaaaggcttttttctcacggaactacttagttttcccacggtatttaacaggaaatgaggtagttttgaccggatgcaagtgaaaattgttgattttcgcgcgaaaactgaatgaggaagtgtttttctgaataatgtggtatttatggcagggtggagtatttgttcagggccaggtagactttgacccattacgtggaggtttcgattaccgtgttttttacctgaatttccgcgtaccgtgtcaaagtcttctgtttttacgtaggtgtcagctgatcgctagggtatttatacctcagggtttgtgtcaagaggccactcttgagtgccagcgagaagagttttctcctctgcgccggcagtttaataataaaaaaatgagagatttgcgatttctgcctcaggaaataatctctgctgagactggaaatgaaatattggagcttgtggtgcacgccctgatgggagacgatccggagccacctgtgcagctttttgagcctcctacgcttcaggaactgtatgatttagaggtagagggatcggaggattctaatgaggaagctgtaaatggcttttttaccgattctatgcttttagctgctaatgaagggttagaattagatccgcctttggacacttttgatactccaggggtaattgtggaaagcggtacaggtgtaagaaaattacctgatttgagttccgtggactgtgatttgcactgctatgaagacgggtttcctccgagtgatgaggaggaccatgaaaaggagcagtccatgcagactgcagcgggtgagggagtgaaggctgccaatgttggttttcagttggattgcccggagcttcctggacatggctgtaagtcttgtgaatttcacaggaaaaatactggagtaaaggaactgttatgttcgctttgttatatgagaacgcactgccactttatttacagtaagtgtgtttaagttaaaatttaaaggaatatgctgtttttcacatgtatattgagtgtgagttttgtgcttcttattataggtcctgtgtctgatgctgatgaatcaccatctcctgattctactacctcacctcctgagattcaagcacctgttcctgtggacgtgcgcaagcccattcctgtgaagcttaagcctgggaaacgtccagcagtggaaaaacttgaggacttgttacagggtggggacggacctttggacttgagtacacggaaacgtccaagacaataagtgttccatatccgtgtttacttaaggtgacgtcaatatttgtgtgacagtgcaatgtaataaaaatatgttaactgttcactggtttttattgctttttgggcggggactcaggtatataagtagaagcagacctgtgtggttagctcataggagctggctttcatccatggaggtttgggccattttggaagaccttaggaagactaggcaactgttagagaacgcttcggacggagtctccggtttttggagattctggttcgctagtgaattagctagggtagtttttaggataaaacaggactataaacaagaatttgaaaagttgttggtagattgcccaggactttttgaagctcttaatttgggccatcaggttcactttaaagaaaaagttttatcagttttagacttttcaaccccaggtagaactgctgctgctgtggcttttcttacttttatattagataaatggatcccgcagactcatttcagcaggggatacgttttggatttcatagccacagcattgtggagaacatggaaggttcgcaagatgaggacaatcttaggttactggccagtgcagcctttgggtgtagcgggaatcctgaggcatccaccggtcatgccagcggttctggaggaggaacagcaagaggacaacccgagagccggcctggaccctccagtggaggaggcggagtagctgacttgtctcctgaactgcaacgggtgcttactggatctacgtccactggacgggataggggcgttaagagggagagggcatctagtggtactgatgctagatctgagttggctttaagtttaatgagtcgcagacgtcctgaaaccatttggtggcatgaggttcagaaagagggaagggatgaagtttctgtattgcaggagaaatattcactggaacaggtgaaaacatgttggttggagcctgaggatgattgggaggtggccattaaaaattatgccaagatagctttgaggcctgataaacagtataagattactagacggattaatatccggaatgcttgttacatatctggaaatggggctgaggtggtaatagatactcaagacaaggcagttattagatgctgcatgatggatatgtggcctggggtagtcggtatggaagcagtaacttttgtaaatgttaagtttaggggagatggttataatggaatagtgtttatggccaataccaaacttatattgcatggttgtagcttttttggtttcaacaatacctgtgtagatgcctggggacaggttagtgtacggggatgtagtttctatgcgtgttggattgccacagctggcagaaccaagagtcaattgtctctgaagaaatgcatatttcaaagatgtaacctgggcattctgaatgaaggcgaagcaagggtccgccactgcgcttctacagatactggatgttttattttgattaagggaaatgccagcgtaaagcataacatgatttgcggtgcttccgatgagaggccttatcaaatgctcacttgtgctggtgggcattgtaatatgctggctactgtgcatattgtttcccatcaacgcaaaaaatggcctgtttttgatcacaatgtgatgacgaagtgtaccatgcatgcaggtgggcgtagaggaatgtttatgccttaccagtgtaacatgaatcatgtgaaagtgttgttggaaccagatgccttttccagaatgagcctaacaggaatttttgacatgaacatgcaaatctggaagatcctgaggtatgatgatacgagatcgagggtacgcgcatgcgaatgcggaggcaagcatgccaggttccagccggtgtgtgtagatgtgactgaagatctcagaccggatcatttggttattgcccgcactggagcagagttcggatccagtggagaagaaactgactaaggtgagtattgggaaaactttggggtgggattttcagatggacagattgagtaaaaatttgttttttctgtcttgcagctgtcatgagtggaaacgcttcttttaaggggggagtcttcagcccttatctgacagggcgtctcccatcctgggcaggagttcgtcagaatgttatgggatctactgtggatggaagacccgtccaacccgccaattcttcaacgctgacctatgctactttaagttcttcacctttggacgcagctgcagctgccgccgccgcttctgttgccgctaacactgtgcttggaatgggttactatggaagcatcatggctaattccacttcctctaataacccttctaccctgactcaggacaagttacttgtccttttggcccagctggaggctttgacccaacgtctgggtgaactttctcagcaggtggtcgagttgcgagtacaaactgagtctgctgtcggcacggcaaagtctaaataaaaaaatcccagaatcaatgaataaataaacaagcttgttgttgatttaaaatcaagtgtttttatttcatttttcgcgcacggtatgccctagaccaccgatctctatcattgagaactcggtggattttttccaggatcctatagaggtgggattgaatgtttagatacatgggcattaggccgtctttggggtggagatagctccattgaagggattcatgctccggggtagtgttgtaaatcacccagtcataacaaggtcgcagtgcatggtgttgcacaatatcttttagaagtaggctgattgccacagataagcccttggtgtaggtgtttacaaaccggttgagctgggatgggtgcattcggggtgaaattatgtgcattttggattggatttttaagttggcaatattgccgccaagatcccgtcttgggttcatgttatgaaggaccaccaagacggtgtatccggtacatttaggaaatttatcgtgcagcttggatggaaaagcgtggaaaaatttggagacacccttgtgtcctccaagattttccatgcactcatccatgataatagcaatggggccgtgggcagcggcgcgggcaaacacgttccgtgggtctgacacatcatagttatgttcctgagttaaatcatcataagccattttaatgaatttggggcggagagtaccagattggggtatgaatgttccttcgggccccggagcatagttcccctcacagatttgcatttcccaagctttcagttccgagggtggaatcatgtccacctggggggctatgaaaaacaccgtttctggggcgggggtgattaattgtgatgatagcaaatttctgagcaattgagatttgccacatccggtggggccataaatgattccgattacgggttgcaggtggtagtttagggaacggcaactgccgtcttctcgaagcaagggggccacctcgttcatcatttcccttacatgcatattttcccgcaccaaatccattaggaggcgctctcctcctagtgatagaagttcttgtagtgaggaaaagtttttcagcggtttcagaccgtcagccatgggcattttggagagagtttgctgcaaaagttctagtctgttccacagttcagtgatgtgttctatggcatctcgatccagcagacctcctcgtttcgcgggtttggacggctcctggaatagggtatgagacgatgggcgtccagcgctgccagggttcggtccttccagggtctcagtgttcgagtcagggttgtttccgtcacagtgaaggggtgtgcgcctgcttgggcgcttgccagggtgcgcttcagactcatcctgctggtcgaaaacttctgtcgcttggcgccctgtatgtcggccaagtagcagtttaccatgagttcgtagttgagcgcctcggctgcgtggcctttggcgcggagcttacctttggaagttttcttgcataccgggcagtataggcatttcagcgcatacaacttgggcgcaaggaaaacggattctggggagtatgcatctgcgccgcaggaggcgcaaacagtttcacattccaccagccaggttaaatccggttcattggggtcaaaaacaagttttccgccatattttttgatgcgtttcttacctttggtctccatgagttcgtgtcctcgttgagtgacaaacaggctgtccgtgtccccgtagactgattttacaggcctcttctccagtggagtgcctcggtcttcttcgtacaggaactctgaccactctgatacaaaggcgcgcgtccaggccagcacaaaggaggctatgtgggaggggtagcgatcgttgtcaaccagggggtccaccttttccaaagtatgcaaacacatgtcaccctcttcaacatccaggaatgtgattggcttgtaggtgtatttcacgtgacctggggtccccgctgggggggtataaaagggggcggttctttgctcttcctcactgtcttccggatcgctgtccaggaacgtcagctgttggggtaggtattccctctcgaaggcgggcatgacctctgcactcaggttgtcagtttctaagaacgaggaggatttgatattgacagtgccggttgagatgcctttcatgaggttttcgtccatctggtcagaaaacacaatttttttattgtcaagtttggtggcaaatgatccatacagggcgttggataaaagtttggcaatggatcgcatggtttggttcttttccttgtccgcgcgctctttggcggcgatgttgagttggacatactcgcgtgccaggcacttccattcggggaagatagttgttaattcatctggcacgattctcacttgccaccctcgattatgcaaggtaattaaatccacactggtggccacctcgcctcgaaggggttcattggtccaacagagcctacctcctttcctagaacagaaagggggaagtgggtctagcataagttcatcgggagggtctgcatccatggtaaagattcccggaagtaaatccttatcaaaatagctgatgggagtggggtcatctaaggccatttgccattctcgagctgccagtgcgcgctcatatgggttaaggggactgccccatggcatgggatgggtgagtgcagaggcatacatgccacagatgtcatagacgtagatgggatcctcaaagatgcctatgtaggttggatagcatcgcccccctctgatacttgctcgcacatagtcatatagttcatgtgatggcgctagcagccccggacccaagttggtgcgattgggtttttctgttctgtagacgatctggcgaaagatggcgtgagaattggaagagatggtgggtctttgaaaaatgttgaaatgggcatgaggtagacctacagagtctctgacaaagtgggcataagattcttgaagcttggttaccagttcggcggtgacaagtacgtctagggcgcagtagtcaagtgtttcttgaatgatgtcataacctggttggtttttcttttcccacagttcgcggttgagaaggtattcttcgcgatccttccagtactcttctagcggaaacccgtctttgtctgcacggtaagatcctagcatgtagaactgattaactgccttgtaagggcagcagcccttctctacgggtagagagtatgcttgagcagcttttcgtagcgaagcgtgagtaagggcaaaggtgtctctgaccatgactttgaggaattggtatttgaagtcgatgtcgtcacaggctccctgttcccagagttggaagtctacccgtttcttgtaggcggggttgggcaaagcgaaagtaacatcattgaagagaatcttgccggccctgggcatgaaattgcgagtgatgcgaaaaggctgtggtacttccgctcggttattgataacctgggcagctaggacgatctcgtcgaaaccgttgatgttgtgtcctacgatgtataattctatgaaacgcggcgtgcctctgacgtgaggtagcttactgagctcatcaaaggttaggtctgtggggtcagataaggcgtagtgttcgagagcccattcgtgcaggtgaggattcgctttaaggaaggaggaccagaggtccactgccagtgctgtttgtaactggtcccggtactgacgaaaatgccgtccgactgccattttttctggggtgacgcaatagaaggtttgggggtcctgccgccagcgatcccacttgagttttatggcgaggtcataggcgatgttgacgagccgctggtctccagagagtttcatgaccagcatgaaggggattagctgcttgccaaaggaccccatccaggtgtaggtttccacatcgtaggtgagaaagagcctttctgtgcgaggatgagagccaatcgggaagaactggatctcctgccaccagttggaggaatggctgttgatgtgatggaagtagaactccctgcgacgcgccgagcattcatgcttgtgcttgtacagacggccgcagtagtcgcagcgttgcacgggttgtatctcgtgaatgagttgtacctggcttcccttgacgagaaatttcagtgggaagccgaggcctggcgattgtatctcgtgctttactatgttgtctgcatcggcctgttcatcttctgtctcgatggtggtcatgctgacgagccctcgcgggaggcaagtccagacctcggcgcggcaggggcggagctcgaggacgagagcgcgcaggctggagctgtccagggtcctgagacgctgcggactcaggttagtaggcagtgtcaggagattaacttgcatgatcttttggagggcgtgcgggaggttcagatagtacttgatctcaacgggtccgttggtggagatgtcgatggcttgcagggttccgtgtcccttgggcgctaccaccgtgcccttgtttttcattttggacggcggtggctctgttgcttcttgcatgtttagaagcggtgtcgagggcgcgcaccgggcggcaggggcggctcgggacccggcggcatggctggcagtggtacgtcggcgccgcgcgcgggtaggttctggtactgcgccctgagaagactcgcatgcgcgacgacgcggcggttgacatcctggatctgacgcctctgggtgaaagctaccggccccgtgagcttgaacctgaaagagagttcaacagaatcaatctcggtatcgttgacggcggcttgcctaaggatttcttgcacgtcaccagagttgtcctggtaggcgatctccgccatgaactgctcgatctcttcctcttgaagatctccgcggcccgctctctcgacggtggccgcgaggtcgttggagatgcgcccaatgagttgagagaatgcattcatgcccgcctcgttccagacgcggctgtagaccacggcccccacgggatctctcgcgcgcatgaccacctgggcgaggttgagctccacgtggcgggtgaagaccgcatagttgcataggcgctggaaaaggtagttgagtgtggtggcgatgtgctcggtgacgaagaaatacatgatccatcgtctcagcggcatctcgctgacatcgcccagagcttccaagcgctccatggcctcgtagaagtccacggcaaaattaaaaaactgggagtttcgcgcggacacggtcaactcctcttccagaagacggataagttcggcgatggtggtgcgcacctcgcgctcgaaagcccctgggatttcttcctcaatctcttcttcttccactaacatctcttcctcttcaggtggggctgcaggaggagggggaacgcggcgacgccggcggcgcacgggcagacggtcgatgaatctttcaatgacctctccgcggcggcggcgcatggtttcagtgacggcgcggccgttctcgcgcggtcgcagagtaaaaacaccgccgcgcatctccttaaagtggtgactgggaggttctccgtttgggagggagagggcgctgattatacattttattaattggcccgtagggactgcacgcagagatctgatcgtgtcaagatccacgggatctgaaaacctttcgacgaaagcgtctaaccagtcacagtcacaaggtaggctgagtacggcttcttgtgggcgggggtggttatgtgttcggtctgggtcttctgtttcttcttcatctcgggaaggtgagacgatgctgctggtgatgaaattaaagtaggcagttctaagacggcggatggtggcgaggagcaccaggtctttgggtccggcttgctggatacgcaggcgattggccattccccaagcattatcctgacatctagcaagatctttgtagtagtcttgcatgagccgttctacgggcacttcttcctcacccgttctgccatgcatacgtgtgagtccaaatccgcgcattggttgtaccagtgccaagtcagctacgactctttcggcgaggatggcttgctgtacttgggtaagggtggcttgaaagtcatcaaaatccacaaagcggtggtaagctcctgtattaatggtgtaagcacagttggccatgactgaccagttaactgtctggtgaccagggcgcacgagctcggtgtatttaaggcgcgaataggcgcgggtgtcaaagatgtaatcgttgcaggtgcgcaccagatactggtaccctataagaaaatgcggcggtggttggcggtagagaggccatcgttctgtagctggagcgccaggggcgaggtcttccaacataaggcggtgatagccgtagatgtacctggacatccaggtgattcctgcggcggtagtagaagcccgaggaaactcgcgtacgcggttccaaatgttgcgtagcggcatgaagtagttcattgtaggcacggtttgaccagtgaggcgcgcgcagtcattgatgctctatagacacggagaaaatgaaagcgttcagcgactcgactccgtagcctggaggaacgtgaacgggttgggtcgcggtgtaccccggttcgagacttgtactcgagccggccggagccgcggctaacgtggtattggcactcccgtctcgacccagcctacaaaaatccaggatacggaatcgagtcgttttgctggtttccgaatggcagggaagtgagtcctattttttttttttgccgctcagatgcatcccgtgctgcgacagatgcgcccccaacaacagcccccctcgcagcagcagcagcagcaatcacaaaaggctgtccctgcaactactgcaactgccgccgtgagcggtgcgggacagcccgcctatgatctggacttggaagagggcgaaggactggcacgtctaggtgcgccttcacccgagcggcatccgcgagttcaactgaaaaaagattctcgcgaggcgtatgtgccccaacagaacctatttagagacagaagcggcgaggagccggaggagatgcgagcttcccgctttaacgcgggtcgtgagctgcgtcacggtttggaccgaagacgagtgttgcgggacgaggatttcgaagttgatgaaatgacagggatcagtcctgccagggcacacgtggctgcagccaaccttgtatcggcttacgagcagacagtaaaggaagagcgtaacttccaaaagtcttttaataatcatgtgcgaaccctgattgcccgcgaagaagttacccttggtttgatgcatttgtgggatttgatggaagctatcattcagaaccctactagcaaacctctgaccgcccagctgtttctggtggtgcaacacagcagagacaatgaggctttcagagaggcgctgctgaacatcaccgaacccgaggggagatggttgtatgatcttatcaacattctacagagtatcatagtgcaggagcggagcctgggcctggccgagaaggtggctgccatcaattactcggttttgagcttgggaaaatattacgctcgcaaaatctacaagactccatacgttcccatagacaaggaggtgaagatagatgggttctacatgcgcatgacgctcaaggtcttgaccctgagcgatgatcttggggtgtatcgcaatgacagaatgcatcgcgcggttagcgccagcaggaggcgcgagttaagcgacagggaactgatgcacagtttgcaaagagctctgactggagctggaaccgagggtgagaattacttcgacatgggagctgacttgcagtggcagcctagtcgcagggctctgagcgccgcgacggcaggatgtgagcttccttacatagaagaggcggatgaaggcgaggaggaagagggcgagtacttggaagactgatggcacaacccgtgttttttgctagatggaacagcaagcaccggatcccgcaatgcgggcggcgctgcagagccagccgtccggcattaactcctcggacgattggacccaggccatgcaacgtatcatggcgttgacgactcgcaaccccgaagcctttagacagcaaccccaggccaaccgtctatcggccatcatggaagctgtagtgccttcccgctctaatcccactcatgagaaggtcctggccatcgtgaacgcgttggtggagaacaaagctattcgtccagatgaggccggactggtatacaacgctctcttagaacgcgtggctcgctacaacagtagcaatgtgcaaaccaatttggaccgtatgataacagatgtacgcgaagccgtgtctcagcgcgaaaggttccagcgtgatgccaacctgggttcgctggtggcgttaaatgctttcttgagtactcagcctgctaatgtgccgcgtggtcaacaggattatactaactttttaagtgctttgagactgatggtatcagaagtacctcagagcgaagtgtatcagtccggtcctgattacttctttcagactagcagacagggcttgcagacggtaaatctgagccaagcttttaaaaaccttaaaggtttgtggggagtgcatgccccggtaggagaaagagcaaccgtgtctagcttgttaactccgaactcccgcctattattactgttggtagctcctttcaccgacagcggtagcatcgaccgtaattcctatttgggttacctactaaacctgtatcgcgaagccatagggcaaagtcaggtggacgagcagacctatcaagaaattacccaagtcagtcgcgctttgggacaggaagacactggcagtttggaagccactctgaacttcttgcttaccaatcggtctcaaaagatccctcctcaatatgctcttactgcggaggaggagaggatccttagatatgtgcagcagagcgtgggattgtttctgatgcaagagggggcaactccgactgcagcactggacatgacagcgcgaaatatggagcccagcatgtatgccagtaaccgacctttcattaacaaactgctggactacttgcacagagctgccgctatgaactctgattatttcaccaatgccatcttaaacccgcactggctgcccccacctggtttctacacgggcgaatatgacatgcccgaccctaatgacggatttctgtgggacgacgtggacagcgatgttttttcacctctttctgatcatcgcacgtggaaaaaggaaggcggcgatagaatgcattcttctgcatcgctgtccggggtcatgggtgctaccgcggctgagcccgagtctgcaagtccttttcctagtctacccttttctctacacagtgtacgtagcagcgaagtgggtagaataagtcgcccgagtttaatgggcgaagaggagtatctaaacgattccttgctcagaccggcaagagaaaaaaatttcccaaacaatggaatagaaagtttggtggataaaatgagtagatggaagacttatgctcaggatcacagagacgagcctgggatcatggggattacaagtagagcgagccgtagacgccagcgccatgacagacagaggggtcttgtgtgggacgatgaggattcggccgatgatagcagcgtgctggacttgggtgggagaggaaggggcaacccgtttgctcatttgcgccctcgcttgggtggtatgttgtaaaaaaaaataaaaaaaaaactcaccaaggccatggcgacgagcgtacgttcgttcttctttattatctgtgtctagtataatgaggcgagtcgtgctaggcggagcggtggtgtatccggagggtcctcctccttcgtacgagagcgtgatgcagcagcagcaggcgacggcggtgatgcaatccccactggaggctccctttgtgcctccgcgatacctggcacctacggagggcagaaacagcattcgttattcggaactggcacctcagtacgataccaccaggttgtatctggtggacaacaagtcggcggacattgcttctctgaactatcagaatgaccacagcaacttcttgaccacggtggtgcaaaacaatgactttacccctacggaagccagcacccagaccattaactttgatgaacgatcgcggtggggcggtcagctaaagaccatcatgcatactaacatgccaaacgtgaacgagtatatgtttagtaacaagttcaaagcgcgtgtgatggtgtccagaaaacctcccgacggtgctgcagttggggatacttatgatcacaagcaggatattttgaaatatgagtggttcgagtttactttgccagaaggcaacttttcagttactatgactattgatttgatgaacaatgccatcatagataattacttgaaagtgggtagacagaatggagtgcttgaaagtgacattggtgttaagttcgacaccaggaacttcaagctgggatgggatcccgaaaccaagttgatcatgcctggagtgtatacgtatgaagccttccatcctgacattgtcttactgcctggctgcggagtggattttaccgagagtcgtttgagcaaccttcttggtatcagaaaaaaacagccatttcaagagggttttaagattttgtatgaagatttagaaggtggtaatattccggccctcttggatgtagatgcctatgagaacagtaagaaagaacaaaaagccaaaatagaagctgctacagctgctgcagaagctaaggcaaacatagttgccagcgactctacaagggttgctaacgctggagaggtcagaggagacaattttgcgccaacacctgttccgactgcagaatcattattggccgatgtgtctgaaggaacggacgtgaaactcactattcaacctgtagaaaaagatagtaagaatagaagctataatgtgttggaagacaaaatcaacacagcctatcgcagttggtatctttcgtacaattatggcgatcccgaaaaaggagtgcgttcctggacattgctcaccacctcagatgtcacctgcggagcagagcaggtctactggtcgcttccagacatgatgaaggatcctgtcactttccgctccactagacaagtcagtaactaccctgtggtgggtgcagagcttatgcccgtcttctcaaagagcttctacaacgaacaagctgtgtactcccagcagctccgccagtccacctcgcttacgcacgtcttcaaccgctttcctgagaaccagattttaatccgtccgccggcgcccaccattaccaccgtcagtgaaaacgttcctgctctcacagatcacgggaccctgccgttgcgcagcagtatccggggagtccaacgtgtgaccgttactgacgccagacgccgcacctgtccctacgtgtacaaggcactgggcatagtcgcaccgcgcgtcctttcaagccgcactttctaaaaaaaaaaaaaatgtccattcttatctcgcccagtaataacaccggttggggtctgcgcgctccaagcaagatgtacggaggcgcacgcaaacgttctacccaacatcctgtccgtgttcgcggacattttcgcgctccatggggcgccctcaagggccgcactcgcgttcgaaccaccgtcgatgatgtaatcgatcaggtggttgccgacgcccgtaattatactcctactgcgcctacatctactgtggatgcagttattgacagtgtagtggctgacgctcgcaactatgctcgacgtaagagccggcgaaggcgcattgccagacgccaccgagctaccactgccatgcgagccgcaagagctctgctacgaagagctagacgcgtggggcgaagagccatgcttagggcggccagacgtgcagcttcgggcgccagcgccggcaggtcccgcaggcaagcagccgctgtcgcagcggcgactattgccgacatggcccaatcgcgaagaggcaatgtatactgggtgcgtgacgctgccaccggtcaacgtgtacccgtgcgcacccgtccccctcgcacttagaagatactgagcagtctccgatgttgtgtcccagcggcgaggatgtccaagcgcaaatacaaggaagaaatgctgcaggttatcgcacctgaagtctacggccaaccgttgaaggatgaaaaaaaaccccgcaaaatcaagcgggttaaaaaggacaaaaaagaagaggaagatggcgatgatgggctggcggagtttgtgcgcgagtttgccccacggcgacgcgtgcaatggcgtgggcgcaaagttcgacatgtgttgagacctggaacttcggtggtctttacacccggcgagcgttcaagcgctacttttaagcgttcctatgatgaggtgtacggggatgatgatattcttgagcaggcggctgaccgattaggcgagtttgcttatggcaagcgtagtagaataacttccaaggatgagacagtgtcgatacccttggatcatggaaatcccacccctagtcttaaaccggtcactttgcagcaagtgttacccgtaactccgcgaacaggtgttaaacgcgaaggtgaagatttgtatcccactatgcaactgatggtacccaaacgccagaagttggaggacgttttggagaaagtaaaagtggatccagatattcaacctgaggttaaagtgagacccattaagcaggtagcgcctggtctgggggtacaaactgtagacattaagattcccactgaaagtatggaagtgcaaactgaacccgcaaagcctactgccacctccactgaagtgcaaacggatccatggatgcccatgcctattacaactgacgccgccggtcccactcgaagatcccgacgaaagtacggtccagcaagtctgttgatgcccaattatgttgtacacccatctattattcctactcctggttaccgaggcactcgctactatcgcagccgaaacagtacctcccgccgtcgccgcaagacacctgcaaatcgcagtcgtcgccgtagacgcacaagcaaaccgactcccggcgccctggtgcggcaagtgtaccgcaatggtagtgcggaacctttgacactgccgcgtgcgcgttaccatccgagtatcatcacttaatcaatgttgccgctgcctccttgcagatatggccctcacttgtcgccttcgcgttcccatcactggttaccgaggaagaaactcgcgccgtagaagagggatgttgggacgcggaatgcgacgctacaggcgacggcgtgctatccgcaagcaattgcggggtggttttttaccagccttaattccaattatcgctgctgcaattggcgcgataccaggcatagcttccgtggcggttcaggcctcgcaacgacattgacattggaaaaaaacgtataaataaaaaaaaaaaaatacaatggactctgacactcctggtcctgtgactatgttttcttagagatggaagacatcaatttttcatccttggctccgcgacacggcacgaagccgtacatgggcacctggagcgacatcggcacgagccaactgaacgggggcgccttcaattggagcagtatctggagcgggcttaaaaattttggctcaaccataaaaacatacgggaacaaagcttggaacagcagtacaggacaggcgcttagaaataaacttaaagaccagaacttccaacaaaaagtagtcgatgggatagcttccggcatcaatggagtggtagatttggctaaccaggctgtgcagaaaaagataaacagtcgtttggacccgccgccagcaaccccaggtgaaatgcaagtggaggaagaaattcctccgccagaaaaacgaggcgacaagcgtccgcgtcccgatttggaagagacgctggtgacgcgcgtagatgaaccgccttcttatgaggaagcaacgaagcttggaatgcccaccactagaccgatagccccaatggccaccggggtgatgaaaccttctcagttgcatcgacccgtcaccttggatttgccccctccccctgctgctactgctgtacccgcttctaagcctgtcgctgccccgaaaccagtcgccgtagccaggtcacgtcccgggggcgctcctcgtccaaatgcgcactggcaaaatactctgaacagcatcgtgggtctaggcgtgcaaagtgtaaaacgccgtcgctgcttttaattaaatatggagtagcgcttaacttgcctatctgtgtatatgtgtcattacacgccgtcacagcagcagaggaaaaaaggaagaggtcgtgcgtcgacgctgagttactttcaagatggccaccccatcgatgctgccccaatgggcatacatgcacatcgccggacaggatgcttcggagtacctgagtccgggtctggtgcagttcgcccgcgccacagacacctacttcaatctgggaaataagtttagaaatcccaccgtagcgccgacccacgatgtgaccaccgaccgtagccagcggctcatgttgcgcttcgtgcccgttgaccgggaggacaatacatactcttacaaagtgcggtacaccctggccgtgggcgacaacagagtgctggatatggccagcacgttctttgacattaggggtgtgttggacagaggtcccagtttcaaaccctattctggtacggcttacaactccctggctcctaaaggcgctccaaatacatctcagtggattgcagaaggtgtaaaaaatacaactggtgaggaacacgtaacagaagaggaaaccaatactactacttacacttttggcaatgctcctgtaaaagctgaagctgaaattacaaaagaaggactcccagtaggtttggaagtttcagatgaagaaagtaaaccgatttatgctgataaaacatatcagccagaacctcagctgggagatgaaacttggactgaccttgatggaaaaaccgaaaagtatggaggcagggctctcaaacccgatactaagatgaaaccatgctacgggtcctttgccaaacctactaatgtgaaaggcggtcaggcaaaacaaaaaacaacggagcagccaaatcagaaagtcgaatatgatatcgacatggagttttttgatgcggcatcgcagaaaacaaacttaagtcctaaaattgtcatgtatgcagaaaatgtaaatttggaaactccagacactcatgtagtgtacaaacctggaacagaagacacaagttccgaagctaatttgggacaacaatctatgcccaacagacccaactacattggcttcagagataactttattggacttatgtactataacagtactggtaacatgggggtgctggctggtcaagcgtctcagttaaatgcagtggttgacttgcaggacagaaacacagaactttcttaccaactcttgcttgactctctgggcgacagaaccagatactttagcatgtggaatcaggctgtggacagttatgatcctgatgtacgtgttattgaaaatcatggtgtggaagatgaacttcccaactactgttttccactggacggcataggtgttccaacaaccagttacaaatcaatagttccaaatggagacaatgcgcctaattggaaggaacctgaagtaaatggaacaagtgagatcggacagggtaatttgtttgccatggaaattaaccttcaagccaatctatggcgaagtttcctttattccaatgtggctctatatctcccagactcgtacaaatacaccccgtccaatgtcactcttccagaaaacaaaaacacctacgactacatgaacgggcgggtggtgccgccatctctagtagacacctatgtgaacattggtgccaggtggtctctggatgccatggacaatgtcaacccattcaaccaccaccgtaacgctggcttgcgttaccgatccatgcttctgggtaacggacgttatgtgcctttccacatacaagtgcctcaaaaattcttcgctgttaaaaacctgctgcttctcccaggctcctacacttatgagtggaactttaggaaggatgtgaacatggttctacagagttccctcggtaacgacctgcgggtagatggcgccagcatcagtttcacgagcatcaacctctatgctacttttttccccatggctcacaacaccgcttccacccttgaagccatgctgcggaatgacaccaatgatcagtcattcaacgactacctatctgcagctaacatgctctaccccattcctgccaatgcaaccaatattcccatttccattccttctcgcaactgggcggctttcagaggctggtcatttaccagactgaaaaccaaagaaactccctctttggggtctggatttgacccctactttgtctattctggttctattccctacctggatggtaccttctacctgaaccacacttttaagaaggtttccatcatgtttgactcttcagtgagctggcctggaaatgacaggttactatctcctaacgaatttgaaataaagcgcactgtggatggcgaaggctacaacgtagcccaatgcaacatgaccaaagactggttcttggtacagatgctcgccaactacaacatcggctatcagggcttctacattccagaaggatacaaagatcgcatgtattcatttttcagaaacttccagcccatgagcaggcaggtggttgatgaggtcaattacaaagacttcaaggccgtcgccataccctaccaacacaacaactctggctttgtgggttacatggctccgaccatgcgccaaggtcaaccctatcccgctaactatccctatccactcattggaacaactgccgtaaatagtgttacgcagaaaaagttcttgtgtgacagaaccatgtggcgcataccgttctcgagcaacttcatgtctatgggggcccttacagacttgggacagaatatgctctatgccaactcagctcatgctctggacatgacctttgaggtggatcccatggatgagcccaccctgctttatcttctcttcgaagttttcgacgtggtcagagtgcatcagccacaccgcggcatcatcgaggcagtctacctgcgtacaccgttctcggccggtaacgctaccacgtaagaagcttcttgcttcttgcaaatagcagctgcaaccatggcctgcggatcccaaaacggctccagcgagcaagagctcagagccattgtccaagacctgggttgcggaccctattttttgggaacctacgataagcgcttcccggggttcatggcccccgataagctcgcctgtgccattgtaaatacggccggacgtgagacggggggagagcactggttggctttcggttggaacccacgttctaacacctgctacctttttgatccttttggattctcggatgatcgtctcaaacagatttaccagtttgaatatgagggtctcctgcgccgcagcgctcttgctaccaaggaccgctgtattacgctggaaaaatctacccagaccgtgcagggtccccgttctgccgcctgcggacttttctgctgcatgttccttcacgcctttgtgcactggcctgaccgtcccatggacggaaaccccaccatgaaattgctaactggagtgccaaacaacatgcttcattctcctaaagtccagcccaccctgtgtgacaatcaaaaagcactctaccattttcttaatacccattcgccttattttcgctcccatcgtacacacatcgaaagggccactgcgttcgaccgtatggatgttcaataatgactcatgtaaacaacgtgttcaataaacatcactttatttttttacatgtatcaaggctctgcattacttatttatttacaagtcgaatgggttctgacgagaatcagaatgacccgcaggcagtgatacgttgcggaactgatacttgggttgccacttgaattcgggaatcaccaacttgggaaccggtatatcgggcaggatgtcactccacagctttctggtcagctgcaaagctccaagcaggtcaggagccgaaatcttgaaatcacaattaggaccagtgctttgagcgcgagagttgcggtacaccggattgcagcactgaaacaccatcagcgacggatgtctcacgcttgccagcacggtgggatctgcaatcatgcccacatccagatcttcagcattggcaatgctgaacggggtcatcttgcaggtctgcctacccatggcgggcacccaattaggcttgtggttgcaatcgcagtgcagggggatcagtatcatcttggcctgatcctgtctgattcctggatacacggctctcatgaaagcatcatattgcttgaaagcctgctgggctttactaccctcggtataaaacatcccgcaggacctgctcgaaaactggttagctgcacagccggcatcattcacacagcagcgggcgtcattgttagctatttgcaccacacttctgccccagcggttttgggtgattttggttcgctcgggattctcctttaaggctcgttgtccgttctcgctggccacatccatctcgataatctgctccttctgaatcataatattgccatgcaggcacttcagcttgccctcataatcattgcagccatgaggccacaacgcacagcctgtacattcccaattatggtgggcgatctgagaaaaagaatgtatcattccctgcagaaatcttcccatcatcgtgctcagtgtcttgtgactagtgaaagttaactggatgcctcggtgctcctcgtttacgtactggtgacagatgcgcttgtattgttcgtgttgctcaggcattagtttaaaagaggttctaagttcgttatccagcctgtacttctccatcagcagacacatcacttccatgcctttctcccaagcagacaccaggggcaagctaatcggattcttaacagtgcaggcagcagctcctttagccagagggtcatctttagcgatcttctcaatgcttcttttgccatccttctcaacgatgcgcacgggcgggtagctgaaacccactgctacaagttgcgcctcttctctttcttcttcgctgtcttgactgatgtcttgcatggggatatgtttggtcttccttggcttctttttggggggtatcggaggaggaggactgtcgctccgttccggagacagggaggattgtgacgtttcgctcaccattaccaactgactgtcggtagaagaacctgaccccacacggcgacaggtgtttctcttcgggggcagaggtggaggcgattgcgaagggctgcggtccgacctggaaggcggatgactggcagaaccccttccgcgttcgggggtgtgctccctgtggcggtcgcttaactgatttccttcgcggctggccattgtgttctcctaggcagagaaacaacagacatggaaactcagccattgctgtcaacatcgccacgagtgccatcacatctcgtcctcagcgacgaggaaaaggagcagagcttaagcattccaccgcccagtcctgccaccacctctaccctagaagataaggaggtcgacgcatctcatgacatgcagaataaaaaagcgaaagagtctgagacagacatcgagcaagacccgggctatgtgacaccggtggaacacgaggaagagttgaaacgctttctagagagagaggatgaaaactgcccaaaacaacgagcagataactatcaccaagatgctggaaatagggatcagaacaccgactacctcatagggcttgacggggaagacgcgctccttaaacatctagcaagacagtcgctcatagtcaaggatgcattattggacagaactgaagtgcccatcagtgtggaagagctcagccgcgcctacgagcttaacctcttttcacctcgtactccccccaaacgtcagccaaacggcacctgcgagccaaatcctcgcttaaacttttatccagcttttgctgtgccagaagtactggctacctatcacatcttttttaaaaatcaaaaaattccagtctcctgccgcgctaatcgcacccgcgccgatgccctactcaatctgggacctggttcacgcttacctgatatagcttccttggaagaggttccaaagatcttcgagggtctgggcaataatgagactcgggccgcaaatgctctgcaaaagggagaaaatggcatggatgagcatcacagcgttctggtggaattggaaggcgataatgccagactcgcagtactcaagcgaagcatcgaggtcacacacttcgcatatcccgctgtcaacctgccccctaaagtcatgacggcggtcatggaccagttactcattaagcgcgcaagtcccctttcagaagacatgcatgacccagatgcctgtgatgagggtaaaccagtggtcagtgatgagcagctaacccgatggctgggcaccgactctcccagggatttggaagagcgtcgcaagcttatgatggccgtggtgctggttaccgtagaactagagtgtctccgacgtttctttaccgattcagaaaccttgcgcaaactcgaagagaatctgcactacacttttagacacggctttgtgcggcaggcatgcaagatatctaacgtggaactcaccaacctggtttcctacatgggtattctgcatgagaatcgcctaggacaaagcgtgctgcacagcaccctgaagggggaagcccgccgtgattacatccgcgattgtgtctatctgtacctgtgccacacgtggcaaaccggcatgggtgtatggcagcaatgtttagaagaacagaacttgaaagagcttgacaagctcttacagaaatctcttaaggttctgtggacagggttcgacgagcgcaccgtcgcttccgacctggcagacctcatcttcccagagcgtctcagggttactttgcgaaacggattgcctgactttatgagccagagcatgcttaacaattttcgctctttcatcctggaacgctccggtatcctgcccgccacctgctgcgcactgccctccgactttgtgcctctcacctaccgcgagtgccccccgccgctatggagtcactgctacctgttccgtctggccaactatctctcctaccactcggatgtgatcgaggatgtgagcggagacggcttgctggagtgtcactgccgctgcaatctgtgcacgccccaccggtccctagcttgcaacccccagttgatgagcgaaacccagataataggcacctttgaattgcaaggccccagcagccaaggcgatgggtcttctcctgggcaaagtttaaaactgaccccgggactgtggacctccgcctacttgcgcaagtttgctccggaagattaccacccctatgaaatcaagttctatgaggaccaatcacagcctccaaaggccgaactttcggcctgcgtcatcacccagggggcaattctggcccaattgcaagccatccaaaaatcccgccaagaatttctactgaaaaagggtaagggggtctaccttgacccccagaccggcgaggaactcaacacaaggttccctcaggatgtcccaacgacgagaaaacaagaagttgaaggtgcagccgccgcccccagaagatatggaggaagattgggacagtcaggcagaggaggcggaggaggacagtctggaggacagtctggaggaagacagtttggaggaggaaaacgaggaggcagaggaggtggaagaagtaaccgccgacaaacagttatcctcggctgcggagacaagcaacagcgctaccatctccgctccgagtcgaggaacccggcggcgtcccagcagtagatgggacgagaccggacgcttcccgaacccaaccagcgcttccaagaccggtaagaaggatcggcagggatacaagtcctggcgggggcataagaatgccatcatctcctgcttgcatgagtgcgggggcaacatatccttcacgcggcgctacttgctattccaccatggggtgaactttccgcgcaatgttttgcattactaccgtcacctccacagcccctactatagccagcaaatcccggcagtctcgacagataaagacagcggcggcgacctccaacagaaaaccagcagcggcagttagaaaatacacaacaagtgcagcaacaggaggattaaagattacagccaacgagccagcgcaaacccgagagttaagaaatcggatctttccaaccctgtatgccatcttccagcagagtcggggtcaagagcaggaactgaaaataaaaaaccgatctctgcgttcgctcaccagaagttgtttgtatcacaagagcgaagatcaacttcagcgcactctcgaggacgccgaggctctcttcaacaagtactgcgcgctgactcttaaagagtaggcagcgaccgcgcttattcaaaaaaggcgggaattacatcatcctcgacatgagtaaagaaattcccacgccttacatgtggagttatcaaccccaaatgggattggcggcaggcgcctcccaggactactccacccgcatgaattggctcagcgccgggccttctatgatttctcgagttaatgatatacgcgcctaccgaaaccaaatacttttggaacagtcagctcttaccaccacgccccgccaacaccttaatcccagaaattggcccgccgccctagtgtaccaggaaagtcccgctcccaccactgtattacttcctcgagacgcccaggccgaagtccaaatgactaatgcaggtgcgcagttagctggcggctccaccctatgtcgtcacaggcctcggcataatataaaacgcctgatgatcagaggccgaggtatccagctcaacgacgagtcggtgagctctccgcttggtctacgaccagacggaatctttcagattgccggctgcgggagatcttccttcacccctcgtcaggctgttctgactttggaaagttcgtcttcgcaaccccgctcgggcggaatcgggaccgttcaatttgtggaggagtttactccctctgtctacttcaaccccttctccggatctcctgggcattacccggacgagttcataccgaacttcgacgcgattagcgagtcagtggacggctacgattgatgtctggtgacgcggctgagctatctcggctgcgacatctagaccactgccgccgctttcgctgctttgcccgggaactcattgagttcatctacttcgaactccccaaggatcaccctcaaggtccggcccacggagtgcggatttctatcgaaggcaaaatagactctcgcctgcaacgaattttctcccagcggcccgtgctgatcgagcgagaccagggaaacaccacggtttccatctactgcatttgtaatcaccccggattgcatgaaagcctttgctgtcttatgtgtactgagtttaataaaaactgaattaagactctcctacggactgccgcttcttcaacccggattttacaaccagaagaacgaaacttttcctgtcgtccaggactctgttaacttcacctttcctactcacaaactagaagctcaacgactacaccgcttttccagaagcattttccctactaatactactttcaaaaccggaggtgagctccaaggtcttcctacagaaaacccttgggtggaagcgggccttgtagtgctaggaattcttgcgggtgggcttgtgattattctttgctacctatacacaccttgcttcactttcttagtggtgttgtggtattggtttaaaaaatggggcccatactagtcttgcttgttttactttcgcttttggaaccgggttctgccaattacgatccatgtctagacttcgacccagaaaactgcacacttacttttgcacccgacacaagccgcatctgtggagttcatcgcctctcttacgaacttggcccccaacgacaaaaatttacctgcatggtgggaatcaaccccatagttatcacccagcaaagtggagatactaagggttgcattcactgctcctgcgattccatcgagtgcacctacaccctgctgaagaccctatgcggcctaagagacctgctaccaatgaattaaaaaatgattaataaaaaatcacttacttgaaatcagcaataaggtctctgttgaaattttctcccagcagcacctcacttccctcttcccaactctggtattctaaaccccgttcagcggcatactttctccatactttaaaggggatgtcaaattttagctcctctcctgtacccacaatcttcatgtctttcttcccagatgaccaagagagtccggctcagtgactccttcaaccctgtctacccctatgaagatgaaagcacctcccaacacccctttataaacccagggtttatttccccaaatggcttcacacaaagcccaaacggagttcttactttaaaatgtttaaccccactaacaaccacaggcggatctctacagctaaaagtgggagggggacttacagtggatgacaccaacggttttttgaaagaaaacataagtgccaccacaccactcgttaagactggtcactctataggtttaccactaggagccggattgggaacgaatgaaaataaactttgtatcaaattaggacaaggacttacattcaattcaaacaacatttgcattgatgacaatattaacaccttatggacaggagtcaaccccaccgaagccaactgtcaaatcatgaactccagtgaatctaatgattgcaaattaattctaacactagttaaaactggagcactagtcactgcatttgtttatgttataggagtatctaacaattttaatatgctaactacacacagaaatataaattttactgcagagctgtttttcgattctactggtaatttactaactagactctcatccctcaaaactccacttaatcataaatcaggacaaaacatggctactggtgccattactaatgctaaaggtttcatgcccagcacgactgcctatcctttcaatgataattctagagaaaaagaaaactacatttacggaacttgttactacacagctagtgatcgcactgcttttcccattgacatatctgtcatgcttaaccgaagagcaataaatgacgagacatcatattgtattcgtataacttggtcctggaacacaggagatgccccagaggtgcaaacctctgctacaaccctagtcacctccccatttaccttttactacatcagagaagacgactgacaaataaagtttgcgatcgccaggcccaccatgtacaggatgcaactcctgtcttgcattgcactaagtcttgcacttgtcacaaacagtaactgggtgaatgtaataagtgatttgaaaaaaattgaagatcttattcaatctatgcatattgatgctactttatatacggaaagtgatgttcaccccagttgcaaagtaacagcaatgaagtgctttctcttggagttacaagttatttcacttgagtccggagatgcaagtattcatgatacagtagaaaatctgatcatcctagcaaacaacagtttgtcttctaatgggaatgtaacagaatctggatgcaaagaatgtgaggaactggaggaaaaaaatattaaagaatttttgcagagttttgtacatattgtccaaatgttcatcaacacttctggaagcggagctactaacttcagcctgctgaagcaggctggagacgtggaggagaaccctggacctgccttgacctttgctttactggtggccctcctggtgctcagctgcaagtcaagctgctctgtgggctgtgatctgcctcaaacccacagcctgggtagcaggaggaccttgatgctcctggcacagatgaggagaatctctcttttctcctgcttgaaggacagacatgactttggatttccccaggaggagtttggcaaccagttccaaaaggctgaaaccatccctgtcctccatgagatgatccagcagatcttcaatctcttcagcacaaaggactcatctgctgcttgggatgagaccctcctagacaaattctacactgaactctaccagcagctgaatgacctggaagcctgtgtgatacagggggtgggggtgacagagactcccctgatgaaggaggactccattctggctgtgaggaaatacttccaaagaatcactctctatctgaaagagaagaaatacagcccttgtgcctgggaggttgtcagagcagaaatcatgagatctttttctttgtcaacaaacttgcaagaaagtttaagaagtaaggaaggaagcggacagtgtactaattatgctctcttgaaattggctggagatgttgagagcaaccctggacctatgtgtcaccagcagttggtcatctcttggttttccctggtttttctggcatctcccctcgtggccatatgggaactgaagaaagatgtttatgtcgtagaattggattggtatccggatgcccctggagaaatggtggtcctcacctgtgacacccctgaagaagatggtatcacctggaccttggaccagagcagtgaggtcttaggctctggcaaaaccctgaccatccaagtcaaagagtttggagatgctggccagtacacctgtcacaaaggaggcgaggttctaagccattcgctcctgctgcttcacaaaaaggaagatggaatttggtccactgatattttaaaggaccagaaagaacccaaaaataagacctttctaagatgcgaggccaagaattattctggacgtttcacctgctggtggctgacgacaatcagtactgatttgacattcagtgtcaaaagcagcagaggctcttctgacccccaaggggtgacgtgcggagctgctacactctctgcagagagagtcagaggggacaacaaggagtatgagtactcagtggagtgccaggaggacagtgcctgcccagctgctgaggagagtctgcccattgaggtcatggtggatgccgttcacaagctcaagtatgaaaactacaccagcagcttcttcatcagggacatcatcaaacctgacccacccaagaacttgcagctgaagccattaaagaattctcggcaggtggaggtcagctgggagtaccctgacacctggagtactccacattcctacttctccctgacattctgcgttcaggtccagggcaagagcaagagagaaaagaaagatagagtcttcacggacaagacctcagccacggtcatctgccgcaaaaatgccagcattagcgtgcgggcccaggaccgctactatagctcatcttggagcgaatgggcatctgtgccctgcagtggagggggcggcagcgggggaggcggcagcggcggcgggggatcgagaaacctccccgtggccactccagacccaggaatgttcccatgccttcaccactcccaaaacctgctgagggccgtcagcaacatgctccagaaggccagacaaactctagaattttacccttgcacttctgaagagattgatcatgaagatatcacaaaagataaaaccagcacagtggaggcctgtttaccattggaattaaccaagaatgagagttgcctaaattccagagagacctctttcataactaatgggagttgcctggcctccagaaagacctcttttatgatggccctgtgccttagtagtatttatgaagacttgaagatgtaccaggtggagttcaagaccatgaatgcaaagcttctgatggatcctaagaggcagatctttctagatcaaaacatgctggcagttattgatgagctgatgcaggccctgaatttcaacagtgagactgtgccacaaaaatcctcccttgaagaaccggatttttataaaactaaaatcaagctctgcatacttcttcatgctttcagaattcgggcagtgactattgatagagtgatgagctatctgaatgcttcctaagctagcttgactgactgagatacagcgtaccttcagctcacagacatgataagatacattgatgagtttggacaaaccacaactagaatgcagtgaaaaaaatgctttatttgtgaaatttgtgatgctattgctttatttgtaaccattataagctgcaataaacaagttaacaacaacaattgcattcattttatgtttcaggttcagggggaggtgtgggaggttttttaaagcaagtaaaacctctacaaatgtggtagtcgtcagctatcctgcaggaacttgtttatttgaaaatcaattcacaaaatccgagtagttattttgcctcccccttcccatttaacagaatacaccaatctctccccacgcacagctttaaacatttggataccattagatatagacatggttttagattccacattccaaacagtttcagagcgagccaatctggggtcagtgatagataaaaatccatcgggatagtcttttaaagcgctttcacagtccaactgctgcggatgcgactccggagtctggatcacggtcatctggaagaagaacgatgggaatcataatccgaaaacggtatcggacgattgtgtctcatcaaacccacaagcagccgctgtctgcgtcgctccgtgcgactgctgtttatgggatcagggtccacagtgtcctgaagcatgattttaatagcccttaacatcaactttctggtgcgatgcgcgcagcaacgcattctgatttcactcaaatctttgcagtaggtacaacacattattacaatattgtttaataaaccataattaaaagcgctccagccaaaactcatatctgatataatcgcccctgcatgaccatcataccaaagtttaatataaattaaatgacgttccctcaaaaacacactacccacatacatgatctcttttggcatgtgcatattaacaatctgtctgtaccatggacaacgttggttaatcatgcaacccaatataaccttccggaaccacactgccaacaccgctcccccagccatgcattgaagtgaaccctgctgattacaatgacaatgaagaacccaattctctcgaccgtgaatcacttgagaatgaaaaatatctatagtggcacaacatagacataaatgcatgcatcttctcataatttttaactcctcaggatttagaaacatatcccagggaataggaagctcttgcagaacagtaaagctggcagaacaaggaagaccacgaacacaacttacactatgcatagtcatagtatcacaatctggcaacagcgggtggtcttcagtcatagaagctcgggtttcattttcctcacaacgtggtaactgggctctggtgtaagggtgatgtctggcgcatgatgtcgagcgtgcgcgcaaccttgtcataatggagttgcttcctgacattctcgtattttgtatagcaaaacgcggccctggcagaacacactcttcttcgccttctatcctgccgcttagcgtgttccgtgtgatagttcaagtacaaccacactcttaagttggtcaaaagaatgctggcttcagttgtaatcaaaactccatcgcatctaatcgttctgaggaaatcatccaagcaatgcaactggattgtgtttcaagcaggagaggagagggaagagacggaagaaccatgttaatttttattccaaacgatctcgcagtacttcaaattgtagatcgcgcagatggcatctctcgcccccactgtgttggtgaaaaagcacagctagatcaaaagaaatgcgattttcaaggtgctcaacggtggcttccagcaaagcctccacgcgcacatccaagaacaaaagaataccaaaagaaggagcattttctaactcctcaatcatcatattacattcctgcaccattcccagataattttcagctttccagccttgaattattcgtgtcagttcttgtggtaaatccaatccacacattacaaacaggtcccggagggcgccctccaccaccattcttaaacacaccctcataatgacaaaatatcttgctcctgtgtcacctgtagcgaattgagaatggcaacatcaattgacatgcccttggctctaagttcttctttaagttctagttgtaaaaactctctcatattatcaccaaactgcttagccagaagccccccgggaacaagagcaggggacgctacagtgcagtacaagcgcagacctccccaattggctccagcaaaaacaagattggaataagcatattgggaaccgccagtaatatcatcgaagttgctggaaatataatcaggcagagtttcttgtaaaaattgaataaaagaaaaatttgccaaaaaaacattcaaaacctctgggatgcaaatgcaataggttaccgcgctgcgctccaacattgttagttttgaattagtctgcaaaaataaaaaaaaaaacaagcgtcatatcatagtagcctgacgaacagatggataaatcagtctttccatcacaagacaagccacagggtctccagctcgaccctcgtaaaacctgtcatcatgattaaacaacagcaccgaaagttcctcgcggtgaccagcatgaataattcttgatgaagcatacaatccagacatgttagcatcagttaacgagaaaaaacagccaacatagcctttgggtataattatgcttaatcgtaagtatagcaaagccacccctcgcggatacaaagtaaaaggcacaggagaataaaaaatataattatttctctgctgctgttcaggcaacgtcgcccccggtccctctaaatacacatacaaagcctcatcagccatggcttaccagacaaagtacagcgggcacacaaagcacaagctctaaagtgactctccaacctctccacaatatatatatacacaagccctaaactgacgtaatgggagtaaagtgtaaaaaatcccgccaaacccaacacacaccccgaaactgcgtcaccagggaaaagtacagtttcacttccgcaatcccaacaggcgtaacttcctctttctcacggtacgtgatatcccactaacttgcaacgtcattttcccacggtcgcaccgccccttttagccgttaaccccacagccaatcaccacacgatccacactttttaaaatcacctcatttacatattggcaccattccatctataaggtatattatatagataga

SEQ ID NO: 216 - DNA, 35806 bp, Artificial Sequence
  Genome sequence of NG-781 virus
tctatctatataatataccttatagatggaatggtgccaatatgtaaatgaggtgattttaaaaagtgtggatcgtgtggtgattggctgtggggttaacggctaaaaggggcggtgcgaccgtgggaaaatgacgttttgtgggggtggagtttttttgcaagttgtcgcgggaaatgtgacgcataaaaaggcttttttctcacggaactacttagttttcccacggtatttaacaggaaatgaggtagttttgaccggatgcaagtgaaaattgttgattttcgcgcgaaaactgaatgaggaagtgtttttctgaataatgtggtatttatggcagggtggagtatttgttcagggccaggtagactttgacccattacgtggaggtttcgattaccgtgttttttacctgaatttccgcgtaccgtgtcaaagtcttctgtttttacgtaggtgtcagctgatcgctagggtatttatacctcagggtttgtgtcaagaggccactcttgagtgccagcgagaagagttttctcctctgcgccggcagtttaataataaaaaaatgagagatttgcgatttctgcctcaggaaataatctctgctgagactggaaatgaaatattggagcttgtggtgcacgccctgatgggagacgatccggagccacctgtgcagctttttgagcctcctacgcttcaggaactgtatgatttagaggtagagggatcggaggattctaatgaggaagctgtaaatggcttttttaccgattctatgcttttagctgctaatgaagggttagaattagatccgcctttggacacttttgatactccaggggtaattgtggaaagcggtacaggtgtaagaaaattacctgatttgagttccgtggactgtgatttgcactgctatgaagacgggtttcctccgagtgatgaggaggaccatgaaaaggagcagtccatgcagactgcagcgggtgagggagtgaaggctgccaatgttggttttcagttggattgcccggagcttcctggacatggctgtaagtcttgtgaatttcacaggaaaaatactggagtaaaggaactgttatgttcgctttgttatatgagaacgcactgccactttatttacagtaagtgtgtttaagttaaaatttaaaggaatatgctgtttttcacatgtatattgagtgtgagttttgtgcttcttattataggtcctgtgtctgatgctgatgaatcaccatctcctgattctactacctcacctcctgagattcaagcacctgttcctgtggacgtgcgcaagcccattcctgtgaagcttaagcctgggaaacgtccagcagtggaaaaacttgaggacttgttacagggtggggacggacctttggacttgagtacacggaaacgtccaagacaataagtgttccatatccgtgtttacttaaggtgacgtcaatatttgtgtgacagtgcaatgtaataaaaatatgttaactgttcactggtttttattgctttttgggcggggactcaggtatataagtagaagcagacctgtgtggttagctcataggagctggctttcatccatggaggtttgggccattttggaagaccttaggaagactaggcaactgttagagaacgcttcggacggagtctccggtttttggagattctggttcgctagtgaattagctagggtagtttttaggataaaacaggactataaacaagaatttgaaaagttgttggtagattgcccaggactttttgaagctcttaatttgggccatcaggttcactttaaagaaaaagttttatcagttttagacttttcaaccccaggtagaactgctgctgctgtggcttttcttacttttatattagataaatggatcccgcagactcatttcagcaggggatacgttttggatttcatagccacagcattgtggagaacatggaaggttcgcaagatgaggacaatcttaggttactggccagtgcagcctttgggtgtagcgggaatcctgaggcatccaccggtcatgccagcggttctggaggaggaacagcaagaggacaacccgagagccggcctggaccctccagtggaggaggcggagtagctgacttgtctcctgaactgcaacgggtgcttactggatctacgtccactggacgggataggggcgttaagagggagagggcatctagtggtactgatgctagatctgagttggctttaagtttaatgagtcgcagacgtcctgaaaccatttggtggcatgaggttcagaaagagggaagggatgaagtttctgtattgcaggagaaatattcactggaacaggtgaaaacatgttggttggagcctgaggatgattgggaggtggccattaaaaattatgccaagatagctttgaggcctgataaacagtataagattactagacggattaatatccggaatgcttgttacatatctggaaatggggctgaggtggtaatagatactcaagacaaggcagttattagatgctgcatgatggatatgtggcctggggtagtcggtatggaagcagtaacttttgtaaatgttaagtttaggggagatggttataatggaatagtgtttatggccaataccaaacttatattgcatggttgtagcttttttggtttcaacaatacctgtgtagatgcctggggacaggttagtgtacggggatgtagtttctatgcgtgttggattgccacagctggcagaaccaagagtcaattgtctctgaagaaatgcatatttcaaagatgtaacctgggcattctgaatgaaggcgaagcaagggtccgccactgcgcttctacagatactggatgttttattttgattaagggaaatgccagcgtaaagcataacatgatttgcggtgcttccgatgagaggccttatcaaatgctcacttgtgctggtgggcattgtaatatgctggctactgtgcatattgtttcccatcaacgcaaaaaatggcctgtttttgatcacaatgtgatgacgaagtgtaccatgcatgcaggtgggcgtagaggaatgtttatgccttaccagtgtaacatgaatcatgtgaaagtgttgttggaaccagatgccttttccagaatgagcctaacaggaatttttgacatgaacatgcaaatctggaagatcctgaggtatgatgatacgagatcgagggtacgcgcatgcgaatgcggaggcaagcatgccaggttccagccggtgtgtgtagatgtgactgaagatctcagaccggatcatttggttattgcccgcactggagcagagttcggatccagtggagaagaaactgactaaggtgagtattgggaaaactttggggtgggattttcagatggacagattgagtaaaaatttgttttttctgtcttgcagctgtcatgagtggaaacgcttcttttaaggggggagtcttcagcccttatctgacagggcgtctcccatcctgggcaggagttcgtcagaatgttatgggatctactgtggatggaagacccgtccaacccgccaattcttcaacgctgacctatgctactttaagttcttcacctttggacgcagctgcagctgccgccgccgcttctgttgccgctaacactgtgcttggaatgggttactatggaagcatcatggctaattccacttcctctaataacccttctaccctgactcaggacaagttacttgtccttttggcccagctggaggctttgacccaacgtctgggtgaactttctcagcaggtggtcgagttgcgagtacaaactgagtctgctgtcggcacggcaaagtctaaataaaaaaatcccagaatcaatgaataaataaacaagcttgttgttgatttaaaatcaagtgtttttatttcatttttcgcgcacggtatgccctagaccaccgatctctatcattgagaactcggtggattttttccaggatcctatagaggtgggattgaatgtttagatacatgggcattaggccgtctttggggtggagatagctccattgaagggattcatgctccggggtagtgttgtaaatcacccagtcataacaaggtcgcagtgcatggtgttgcacaatatcttttagaagtaggctgattgccacagataagcccttggtgtaggtgtttacaaaccggttgagctgggatgggtgcattcggggtgaaattatgtgcattttggattggatttttaagttggcaatattgccgccaagatcccgtcttgggttcatgttatgaaggaccaccaagacggtgtatccggtacatttaggaaatttatcgtgcagcttggatggaaaagcgtggaaaaatttggagacacccttgtgtcctccaagattttccatgcactcatccatgataatagcaatggggccgtgggcagcggcgcgggcaaacacgttccgtgggtctgacacatcatagttatgttcctgagttaaatcatcataagccattttaatgaatttggggcggagagtaccagattggggtatgaatgttccttcgggccccggagcatagttcccctcacagatttgcatttcccaagctttcagttccgagggtggaatcatgtccacctggggggctatgaaaaacaccgtttctggggcgggggtgattaattgtgatgatagcaaatttctgagcaattgagatttgccacatccggtggggccataaatgattccgattacgggttgcaggtggtagtttagggaacggcaactgccgtcttctcgaagcaagggggccacctcgttcatcatttcccttacatgcatattttcccgcaccaaatccattaggaggcgctctcctcctagtgatagaagttcttgtagtgaggaaaagtttttcagcggtttcagaccgtcagccatgggcattttggagagagtttgctgcaaaagttctagtctgttccacagttcagtgatgtgttctatggcatctcgatccagcagacctcctcgtttcgcgggtttggacggctcctggaatagggtatgagacgatgggcgtccagcgctgccagggttcggtccttccagggtctcagtgttcgagtcagggttgtttccgtcacagtgaaggggtgtgcgcctgcttgggcgcttgccagggtgcgcttcagactcatcctgctggtcgaaaacttctgtcgcttggcgccctgtatgtcggccaagtagcagtttaccatgagttcgtagttgagcgcctcggctgcgtggcctttggcgcggagcttacctttggaagttttcttgcataccgggcagtataggcatttcagcgcatacaacttgggcgcaaggaaaacggattctggggagtatgcatctgcgccgcaggaggcgcaaacagtttcacattccaccagccaggttaaatccggttcattggggtcaaaaacaagttttccgccatattttttgatgcgtttcttacctttggtctccatgagttcgtgtcctcgttgagtgacaaacaggctgtccgtgtccccgtagactgattttacaggcctcttctccagtggagtgcctcggtcttcttcgtacaggaactctgaccactctgatacaaaggcgcgcgtccaggccagcacaaaggaggctatgtgggaggggtagcgatcgttgtcaaccagggggtccaccttttccaaagtatgcaaacacatgtcaccctcttcaacatccaggaatgtgattggcttgtaggtgtatttcacgtgacctggggtccccgctgggggggtataaaagggggcggttctttgctcttcctcactgtcttccggatcgctgtccaggaacgtcagctgttggggtaggtattccctctcgaaggcgggcatgacctctgcactcaggttgtcagtttctaagaacgaggaggatttgatattgacagtgccggttgagatgcctttcatgaggttttcgtccatctggtcagaaaacacaatttttttattgtcaagtttggtggcaaatgatccatacagggcgttggataaaagtttggcaatggatcgcatggtttggttcttttccttgtccgcgcgctctttggcggcgatgttgagttggacatactcgcgtgccaggcacttccattcggggaagatagttgttaattcatctggcacgattctcacttgccaccctcgattatgcaaggtaattaaatccacactggtggccacctcgcctcgaaggggttcattggtccaacagagcctacctcctttcctagaacagaaagggggaagtgggtctagcataagttcatcgggagggtctgcatccatggtaaagattcccggaagtaaatccttatcaaaatagctgatgggagtggggtcatctaaggccatttgccattctcgagctgccagtgcgcgctcatatgggttaaggggactgccccatggcatgggatgggtgagtgcagaggcatacatgccacagatgtcatagacgtagatgggatcctcaaagatgcctatgtaggttggatagcatcgcccccctctgatacttgctcgcacatagtcatatagttcatgtgatggcgctagcagccccggacccaagttggtgcgattgggtttttctgttctgtagacgatctggcgaaagatggcgtgagaattggaagagatggtgggtctttgaaaaatgttgaaatgggcatgaggtagacctacagagtctctgacaaagtgggcataagattcttgaagcttggttaccagttcggcggtgacaagtacgtctagggcgcagtagtcaagtgtttcttgaatgatgtcataacctggttggtttttcttttcccacagttcgcggttgagaaggtattcttcgcgatccttccagtactcttctagcggaaacccgtctttgtctgcacggtaagatcctagcatgtagaactgattaactgccttgtaagggcagcagcccttctctacgggtagagagtatgcttgagcagcttttcgtagcgaagcgtgagtaagggcaaaggtgtctctgaccatgactttgaggaattggtatttgaagtcgatgtcgtcacaggctccctgttcccagagttggaagtctacccgtttcttgtaggcggggttgggcaaagcgaaagtaacatcattgaagagaatcttgccggccctgggcatgaaattgcgagtgatgcgaaaaggctgtggtacttccgctcggttattgataacctgggcagctaggacgatctcgtcgaaaccgttgatgttgtgtcctacgatgtataattctatgaaacgcggcgtgcctctgacgtgaggtagcttactgagctcatcaaaggttaggtctgtggggtcagataaggcgtagtgttcgagagcccattcgtgcaggtgaggattcgctttaaggaaggaggaccagaggtccactgccagtgctgtttgtaactggtcccggtactgacgaaaatgccgtccgactgccattttttctggggtgacgcaatagaaggtttgggggtcctgccgccagcgatcccacttgagttttatggcgaggtcataggcgatgttgacgagccgctggtctccagagagtttcatgaccagcatgaaggggattagctgcttgccaaaggaccccatccaggtgtaggtttccacatcgtaggtgagaaagagcctttctgtgcgaggatgagagccaatcgggaagaactggatctcctgccaccagttggaggaatggctgttgatgtgatggaagtagaactccctgcgacgcgccgagcattcatgcttgtgcttgtacagacggccgcagtagtcgcagcgttgcacgggttgtatctcgtgaatgagttgtacctggcttcccttgacgagaaatttcagtgggaagccgaggcctggcgattgtatctcgtgctttactatgttgtctgcatcggcctgttcatcttctgtctcgatggtggtcatgctgacgagccctcgcgggaggcaagtccagacctcggcgcggcaggggcggagctcgaggacgagagcgcgcaggctggagctgtccagggtcctgagacgctgcggactcaggttagtaggcagtgtcaggagattaacttgcatgatcttttggagggcgtgcgggaggttcagatagtacttgatctcaacgggtccgttggtggagatgtcgatggcttgcagggttccgtgtcccttgggcgctaccaccgtgcccttgtttttcattttggacggcggtggctctgttgcttcttgcatgtttagaagcggtgtcgagggcgcgcaccgggcggcaggggcggctcgggacccggcggcatggctggcagtggtacgtcggcgccgcgcgcgggtaggttctggtactgcgccctgagaagactcgcatgcgcgacgacgcggcggttgacatcctggatctgacgcctctgggtgaaagctaccggccccgtgagcttgaacctgaaagagagttcaacagaatcaatctcggtatcgttgacggcggcttgcctaaggatttcttgcacgtcaccagagttgtcctggtaggcgatctccgccatgaactgctcgatctcttcctcttgaagatctccgcggcccgctctctcgacggtggccgcgaggtcgttggagatgcgcccaatgagttgagagaatgcattcatgcccgcctcgttccagacgcggctgtagaccacggcccccacgggatctctcgcgcgcatgaccacctgggcgaggttgagctccacgtggcgggtgaagaccgcatagttgcataggcgctggaaaaggtagttgagtgtggtggcgatgtgctcggtgacgaagaaatacatgatccatcgtctcagcggcatctcgctgacatcgcccagagcttccaagcgctccatggcctcgtagaagtccacggcaaaattaaaaaactgggagtttcgcgcggacacggtcaactcctcttccagaagacggataagttcggcgatggtggtgcgcacctcgcgctcgaaagcccctgggatttcttcctcaatctcttcttcttccactaacatctcttcctcttcaggtggggctgcaggaggagggggaacgcggcgacgccggcggcgcacgggcagacggtcgatgaatctttcaatgacctctccgcggcggcggcgcatggtttcagtgacggcgcggccgttctcgcgcggtcgcagagtaaaaacaccgccgcgcatctccttaaagtggtgactgggaggttctccgtttgggagggagagggcgctgattatacattttattaattggcccgtagggactgcacgcagagatctgatcgtgtcaagatccacgggatctgaaaacctttcgacgaaagcgtctaaccagtcacagtcacaaggtaggctgagtacggcttcttgtgggcgggggtggttatgtgttcggtctgggtcttctgtttcttcttcatctcgggaaggtgagacgatgctgctggtgatgaaattaaagtaggcagttctaagacggcggatggtggcgaggagcaccaggtctttgggtccggcttgctggatacgcaggcgattggccattccccaagcattatcctgacatctagcaagatctttgtagtagtcttgcatgagccgttctacgggcacttcttcctcacccgttctgccatgcatacgtgtgagtccaaatccgcgcattggttgtaccagtgccaagtcagctacgactctttcggcgaggatggcttgctgtacttgggtaagggtggcttgaaagtcatcaaaatccacaaagcggtggtaagctcctgtattaatggtgtaagcacagttggccatgactgaccagttaactgtctggtgaccagggcgcacgagctcggtgtatttaaggcgcgaataggcgcgggtgtcaaagatgtaatcgttgcaggtgcgcaccagatactggtaccctataagaaaatgcggcggtggttggcggtagagaggccatcgttctgtagctggagcgccaggggcgaggtcttccaacataaggcggtgatagccgtagatgtacctggacatccaggtgattcctgcggcggtagtagaagcccgaggaaactcgcgtacgcggttccaaatgttgcgtagcggcatgaagtagttcattgtaggcacggtttgaccagtgaggcgcgcgcagtcattgatgctctatagacacggagaaaatgaaagcgttcagcgactcgactccgtagcctggaggaacgtgaacgggttgggtcgcggtgtaccccggttcgagacttgtactcgagccggccggagccgcggctaacgtggtattggcactcccgtctcgacccagcctacaaaaatccaggatacggaatcgagtcgttttgctggtttccgaatggcagggaagtgagtcctattttttttttttgccgctcagatgcatcccgtgctgcgacagatgcgcccccaacaacagcccccctcgcagcagcagcagcagcaatcacaaaaggctgtccctgcaactactgcaactgccgccgtgagcggtgcgggacagcccgcctatgatctggacttggaagagggcgaaggactggcacgtctaggtgcgccttcacccgagcggcatccgcgagttcaactgaaaaaagattctcgcgaggcgtatgtgccccaacagaacctatttagagacagaagcggcgaggagccggaggagatgcgagcttcccgctttaacgcgggtcgtgagctgcgtcacggtttggaccgaagacgagtgttgcgggacgaggatttcgaagttgatgaaatgacagggatcagtcctgccagggcacacgtggctgcagccaaccttgtatcggcttacgagcagacagtaaaggaagagcgtaacttccaaaagtcttttaataatcatgtgcgaaccctgattgcccgcgaagaagttacccttggtttgatgcatttgtgggatttgatggaagctatcattcagaaccctactagcaaacctctgaccgcccagctgtttctggtggtgcaacacagcagagacaatgaggctttcagagaggcgctgctgaacatcaccgaacccgaggggagatggttgtatgatcttatcaacattctacagagtatcatagtgcaggagcggagcctgggcctggccgagaaggtggctgccatcaattactcggttttgagcttgggaaaatattacgctcgcaaaatctacaagactccatacgttcccatagacaaggaggtgaagatagatgggttctacatgcgcatgacgctcaaggtcttgaccctgagcgatgatcttggggtgtatcgcaatgacagaatgcatcgcgcggttagcgccagcaggaggcgcgagttaagcgacagggaactgatgcacagtttgcaaagagctctgactggagctggaaccgagggtgagaattacttcgacatgggagctgacttgcagtggcagcctagtcgcagggctctgagcgccgcgacggcaggatgtgagcttccttacatagaagaggcggatgaaggcgaggaggaagagggcgagtacttggaagactgatggcacaacccgtgttttttgctagatggaacagcaagcaccggatcccgcaatgcgggcggcgctgcagagccagccgtccggcattaactcctcggacgattggacccaggccatgcaacgtatcatggcgttgacgactcgcaaccccgaagcctttagacagcaaccccaggccaaccgtctatcggccatcatggaagctgtagtgccttcccgctctaatcccactcatgagaaggtcctggccatcgtgaacgcgttggtggagaacaaagctattcgtccagatgaggccggactggtatacaacgctctcttagaacgcgtggctcgctacaacagtagcaatgtgcaaaccaatttggaccgtatgataacagatgtacgcgaagccgtgtctcagcgcgaaaggttccagcgtgatgccaacctgggttcgctggtggcgttaaatgctttcttgagtactcagcctgctaatgtgccgcgtggtcaacaggattatactaactttttaagtgctttgagactgatggtatcagaagtacctcagagcgaagtgtatcagtccggtcctgattacttctttcagactagcagacagggcttgcagacggtaaatctgagccaagcttttaaaaaccttaaaggtttgtggggagtgcatgccccggtaggagaaagagcaaccgtgtctagcttgttaactccgaactcccgcctattattactgttggtagctcctttcaccgacagcggtagcatcgaccgtaattcctatttgggttacctactaaacctgtatcgcgaagccatagggcaaagtcaggtggacgagcagacctatcaagaaattacccaagtcagtcgcgctttgggacaggaagacactggcagtttggaagccactctgaacttcttgcttaccaatcggtctcaaaagatccctcctcaatatgctcttactgcggaggaggagaggatccttagatatgtgcagcagagcgtgggattgtttctgatgcaagagggggcaactccgactgcagcactggacatgacagcgcgaaatatggagcccagcatgtatgccagtaaccgacctttcattaacaaactgctggactacttgcacagagctgccgctatgaactctgattatttcaccaatgccatcttaaacccgcactggctgcccccacctggtttctacacgggcgaatatgacatgcccgaccctaatgacggatttctgtgggacgacgtggacagcgatgttttttcacctctttctgatcatcgcacgtggaaaaaggaaggcggcgatagaatgcattcttctgcatcgctgtccggggtcatgggtgctaccgcggctgagcccgagtctgcaagtccttttcctagtctacccttttctctacacagtgtacgtagcagcgaagtgggtagaataagtcgcccgagtttaatgggcgaagaggagtatctaaacgattccttgctcagaccggcaagagaaaaaaatttcccaaacaatggaatagaaagtttggtggataaaatgagtagatggaagacttatgctcaggatcacagagacgagcctgggatcatggggattacaagtagagcgagccgtagacgccagcgccatgacagacagaggggtcttgtgtgggacgatgaggattcggccgatgatagcagcgtgctggacttgggtgggagaggaaggggcaacccgtttgctcatttgcgccctcgcttgggtggtatgttgtaaaaaaaaataaaaaaaaaactcaccaaggccatggcgacgagcgtacgttcgttcttctttattatctgtgtctagtataatgaggcgagtcgtgctaggcggagcggtggtgtatccggagggtcctcctccttcgtacgagagcgtgatgcagcagcagcaggcgacggcggtgatgcaatccccactggaggctccctttgtgcctccgcgatacctggcacctacggagggcagaaacagcattcgttattcggaactggcacctcagtacgataccaccaggttgtatctggtggacaacaagtcggcggacattgcttctctgaactatcagaatgaccacagcaacttcttgaccacggtggtgcaaaacaatgactttacccctacggaagccagcacccagaccattaactttgatgaacgatcgcggtggggcggtcagctaaagaccatcatgcatactaacatgccaaacgtgaacgagtatatgtttagtaacaagttcaaagcgcgtgtgatggtgtccagaaaacctcccgacggtgctgcagttggggatacttatgatcacaagcaggatattttgaaatatgagtggttcgagtttactttgccagaaggcaacttttcagttactatgactattgatttgatgaacaatgccatcatagataattacttgaaagtgggtagacagaatggagtgcttgaaagtgacattggtgttaagttcgacaccaggaacttcaagctgggatgggatcccgaaaccaagttgatcatgcctggagtgtatacgtatgaagccttccatcctgacattgtcttactgcctggctgcggagtggattttaccgagagtcgtttgagcaaccttcttggtatcagaaaaaaacagccatttcaagagggttttaagattttgtatgaagatttagaaggtggtaatattccggccctcttggatgtagatgcctatgagaacagtaagaaagaacaaaaagccaaaatagaagctgctacagctgctgcagaagctaaggcaaacatagttgccagcgactctacaagggttgctaacgctggagaggtcagaggagacaattttgcgccaacacctgttccgactgcagaatcattattggccgatgtgtctgaaggaacggacgtgaaactcactattcaacctgtagaaaaagatagtaagaatagaagctataatgtgttggaagacaaaatcaacacagcctatcgcagttggtatctttcgtacaattatggcgatcccgaaaaaggagtgcgttcctggacattgctcaccacctcagatgtcacctgcggagcagagcaggtctactggtcgcttccagacatgatgaaggatcctgtcactttccgctccactagacaagtcagtaactaccctgtggtgggtgcagagcttatgcccgtcttctcaaagagcttctacaacgaacaagctgtgtactcccagcagctccgccagtccacctcgcttacgcacgtcttcaaccgctttcctgagaaccagattttaatccgtccgccggcgcccaccattaccaccgtcagtgaaaacgttcctgctctcacagatcacgggaccctgccgttgcgcagcagtatccggggagtccaacgtgtgaccgttactgacgccagacgccgcacctgtccctacgtgtacaaggcactgggcatagtcgcaccgcgcgtcctttcaagccgcactttctaaaaaaaaaaaaaatgtccattcttatctcgcccagtaataacaccggttggggtctgcgcgctccaagcaagatgtacggaggcgcacgcaaacgttctacccaacatcctgtccgtgttcgcggacattttcgcgctccatggggcgccctcaagggccgcactcgcgttcgaaccaccgtcgatgatgtaatcgatcaggtggttgccgacgcccgtaattatactcctactgcgcctacatctactgtggatgcagttattgacagtgtagtggctgacgctcgcaactatgctcgacgtaagagccggcgaaggcgcattgccagacgccaccgagctaccactgccatgcgagccgcaagagctctgctacgaagagctagacgcgtggggcgaagagccatgcttagggcggccagacgtgcagcttcgggcgccagcgccggcaggtcccgcaggcaagcagccgctgtcgcagcggcgactattgccgacatggcccaatcgcgaagaggcaatgtatactgggtgcgtgacgctgccaccggtcaacgtgtacccgtgcgcacccgtccccctcgcacttagaagatactgagcagtctccgatgttgtgtcccagcggcgaggatgtccaagcgcaaatacaaggaagaaatgctgcaggttatcgcacctgaagtctacggccaaccgttgaaggatgaaaaaaaaccccgcaaaatcaagcgggttaaaaaggacaaaaaagaagaggaagatggcgatgatgggctggcggagtttgtgcgcgagtttgccccacggcgacgcgtgcaatggcgtgggcgcaaagttcgacatgtgttgagacctggaacttcggtggtctttacacccggcgagcgttcaagcgctacttttaagcgttcctatgatgaggtgtacggggatgatgatattcttgagcaggcggctgaccgattaggcgagtttgcttatggcaagcgtagtagaataacttccaaggatgagacagtgtcgatacccttggatcatggaaatcccacccctagtcttaaaccggtcactttgcagcaagtgttacccgtaactccgcgaacaggtgttaaacgcgaaggtgaagatttgtatcccactatgcaactgatggtacccaaacgccagaagttggaggacgttttggagaaagtaaaagtggatccagatattcaacctgaggttaaagtgagacccattaagcaggtagcgcctggtctgggggtacaaactgtagacattaagattcccactgaaagtatggaagtgcaaactgaacccgcaaagcctactgccacctccactgaagtgcaaacggatccatggatgcccatgcctattacaactgacgccgccggtcccactcgaagatcccgacgaaagtacggtccagcaagtctgttgatgcccaattatgttgtacacccatctattattcctactcctggttaccgaggcactcgctactatcgcagccgaaacagtacctcccgccgtcgccgcaagacacctgcaaatcgcagtcgtcgccgtagacgcacaagcaaaccgactcccggcgccctggtgcggcaagtgtaccgcaatggtagtgcggaacctttgacactgccgcgtgcgcgttaccatccgagtatcatcacttaatcaatgttgccgctgcctccttgcagatatggccctcacttgtcgccttcgcgttcccatcactggttaccgaggaagaaactcgcgccgtagaagagggatgttgggacgcggaatgcgacgctacaggcgacggcgtgctatccgcaagcaattgcggggtggttttttaccagccttaattccaattatcgctgctgcaattggcgcgataccaggcatagcttccgtggcggttcaggcctcgcaacgacattgacattggaaaaaaacgtataaataaaaaaaaaaaaatacaatggactctgacactcctggtcctgtgactatgttttcttagagatggaagacatcaatttttcatccttggctccgcgacacggcacgaagccgtacatgggcacctggagcgacatcggcacgagccaactgaacgggggcgccttcaattggagcagtatctggagcgggcttaaaaattttggctcaaccataaaaacatacgggaacaaagcttggaacagcagtacaggacaggcgcttagaaataaacttaaagaccagaacttccaacaaaaagtagtcgatgggatagcttccggcatcaatggagtggtagatttggctaaccaggctgtgcagaaaaagataaacagtcgtttggacccgccgccagcaaccccaggtgaaatgcaagtggaggaagaaattcctccgccagaaaaacgaggcgacaagcgtccgcgtcccgatttggaagagacgctggtgacgcgcgtagatgaaccgccttcttatgaggaagcaacgaagcttggaatgcccaccactagaccgatagccccaatggccaccggggtgatgaaaccttctcagttgcatcgacccgtcaccttggatttgccccctccccctgctgctactgctgtacccgcttctaagcctgtcgctgccccgaaaccagtcgccgtagccaggtcacgtcccgggggcgctcctcgtccaaatgcgcactggcaaaatactctgaacagcatcgtgggtctaggcgtgcaaagtgtaaaacgccgtcgctgcttttaattaaatatggagtagcgcttaacttgcctatctgtgtatatgtgtcattacacgccgtcacagcagcagaggaaaaaaggaagaggtcgtgcgtcgacgctgagttactttcaagatggccaccccatcgatgctgccccaatgggcatacatgcacatcgccggacaggatgcttcggagtacctgagtccgggtctggtgcagttcgcccgcgccacagacacctacttcaatctgggaaataagtttagaaatcccaccgtagcgccgacccacgatgtgaccaccgaccgtagccagcggctcatgttgcgcttcgtgcccgttgaccgggaggacaatacatactcttacaaagtgcggtacaccctggccgtgggcgacaacagagtgctggatatggccagcacgttctttgacattaggggtgtgttggacagaggtcccagtttcaaaccctattctggtacggcttacaactccctggctcctaaaggcgctccaaatacatctcagtggattgcagaaggtgtaaaaaatacaactggtgaggaacacgtaacagaagaggaaaccaatactactacttacacttttggcaatgctcctgtaaaagctgaagctgaaattacaaaagaaggactcccagtaggtttggaagtttcagatgaagaaagtaaaccgatttatgctgataaaacatatcagccagaacctcagctgggagatgaaacttggactgaccttgatggaaaaaccgaaaagtatggaggcagggctctcaaacccgatactaagatgaaaccatgctacgggtcctttgccaaacctactaatgtgaaaggcggtcaggcaaaacaaaaaacaacggagcagccaaatcagaaagtcgaatatgatatcgacatggagttttttgatgcggcatcgcagaaaacaaacttaagtcctaaaattgtcatgtatgcagaaaatgtaaatttggaaactccagacactcatgtagtgtacaaacctggaacagaagacacaagttccgaagctaatttgggacaacaatctatgcccaacagacccaactacattggcttcagagataactttattggacttatgtactataacagtactggtaacatgggggtgctggctggtcaagcgtctcagttaaatgcagtggttgacttgcaggacagaaacacagaactttcttaccaactcttgcttgactctctgggcgacagaaccagatactttagcatgtggaatcaggctgtggacagttatgatcctgatgtacgtgttattgaaaatcatggtgtggaagatgaacttcccaactactgttttccactggacggcataggtgttccaacaaccagttacaaatcaatagttccaaatggagacaatgcgcctaattggaaggaacctgaagtaaatggaacaagtgagatcggacagggtaatttgtttgccatggaaattaaccttcaagccaatctatggcgaagtttcctttattccaatgtggctctatatctcccagactcgtacaaatacaccccgtccaatgtcactcttccagaaaacaaaaacacctacgactacatgaacgggcgggtggtgccgccatctctagtagacacctatgtgaacattggtgccaggtggtctctggatgccatggacaatgtcaacccattcaaccaccaccgtaacgctggcttgcgttaccgatccatgcttctgggtaacggacgttatgtgcctttccacatacaagtgcctcaaaaattcttcgctgttaaaaacctgctgcttctcccaggctcctacacttatgagtggaactttaggaaggatgtgaacatggttctacagagttccctcggtaacgacctgcgggtagatggcgccagcatcagtttcacgagcatcaacctctatgctacttttttccccatggctcacaacaccgcttccacccttgaagccatgctgcggaatgacaccaatgatcagtcattcaacgactacctatctgcagctaacatgctctaccccattcctgccaatgcaaccaatattcccatttccattccttctcgcaactgggcggctttcagaggctggtcatttaccagactgaaaaccaaagaaactccctctttggggtctggatttgacccctactttgtctattctggttctattccctacctggatggtaccttctacctgaaccacacttttaagaaggtttccatcatgtttgactcttcagtgagctggcctggaaatgacaggttactatctcctaacgaatttgaaataaagcgcactgtggatggcgaaggctacaacgtagcccaatgcaacatgaccaaagactggttcttggtacagatgctcgccaactacaacatcggctatcagggcttctacattccagaaggatacaaagatcgcatgtattcatttttcagaaacttccagcccatgagcaggcaggtggttgatgaggtcaattacaaagacttcaaggccgtcgccataccctaccaacacaacaactctggctttgtgggttacatggctccgaccatgcgccaaggtcaaccctatcccgctaactatccctatccactcattggaacaactgccgtaaatagtgttacgcagaaaaagttcttgtgtgacagaaccatgtggcgcataccgttctcgagcaacttcatgtctatgggggcccttacagacttgggacagaatatgctctatgccaactcagctcatgctctggacatgacctttgaggtggatcccatggatgagcccaccctgctttatcttctcttcgaagttttcgacgtggtcagagtgcatcagccacaccgcggcatcatcgaggcagtctacctgcgtacaccgttctcggccggtaacgctaccacgtaagaagcttcttgcttcttgcaaatagcagctgcaaccatggcctgcggatcccaaaacggctccagcgagcaagagctcagagccattgtccaagacctgggttgcggaccctattttttgggaacctacgataagcgcttcccggggttcatggcccccgataagctcgcctgtgccattgtaaatacggccggacgtgagacggggggagagcactggttggctttcggttggaacccacgttctaacacctgctacctttttgatccttttggattctcggatgatcgtctcaaacagatttaccagtttgaatatgagggtctcctgcgccgcagcgctcttgctaccaaggaccgctgtattacgctggaaaaatctacccagaccgtgcagggtccccgttctgccgcctgcggacttttctgctgcatgttccttcacgcctttgtgcactggcctgaccgtcccatggacggaaaccccaccatgaaattgctaactggagtgccaaacaacatgcttcattctcctaaagtccagcccaccctgtgtgacaatcaaaaagcactctaccattttcttaatacccattcgccttattttcgctcccatcgtacacacatcgaaagggccactgcgttcgaccgtatggatgttcaataatgactcatgtaaacaacgtgttcaataaacatcactttatttttttacatgtatcaaggctctgcattacttatttatttacaagtcgaatgggttctgacgagaatcagaatgacccgcaggcagtgatacgttgcggaactgatacttgggttgccacttgaattcgggaatcaccaacttgggaaccggtatatcgggcaggatgtcactccacagctttctggtcagctgcaaagctccaagcaggtcaggagccgaaatcttgaaatcacaattaggaccagtgctttgagcgcgagagttgcggtacaccggattgcagcactgaaacaccatcagcgacggatgtctcacgcttgccagcacggtgggatctgcaatcatgcccacatccagatcttcagcattggcaatgctgaacggggtcatcttgcaggtctgcctacccatggcgggcacccaattaggcttgtggttgcaatcgcagtgcagggggatcagtatcatcttggcctgatcctgtctgattcctggatacacggctctcatgaaagcatcatattgcttgaaagcctgctgggctttactaccctcggtataaaacatcccgcaggacctgctcgaaaactggttagctgcacagccggcatcattcacacagcagcgggcgtcattgttagctatttgcaccacacttctgccccagcggttttgggtgattttggttcgctcgggattctcctttaaggctcgttgtccgttctcgctggccacatccatctcgataatctgctccttctgaatcataatattgccatgcaggcacttcagcttgccctcataatcattgcagccatgaggccacaacgcacagcctgtacattcccaattatggtgggcgatctgagaaaaagaatgtatcattccctgcagaaatcttcccatcatcgtgctcagtgtcttgtgactagtgaaagttaactggatgcctcggtgctcctcgtttacgtactggtgacagatgcgcttgtattgttcgtgttgctcaggcattagtttaaaagaggttctaagttcgttatccagcctgtacttctccatcagcagacacatcacttccatgcctttctcccaagcagacaccaggggcaagctaatcggattcttaacagtgcaggcagcagctcctttagccagagggtcatctttagcgatcttctcaatgcttcttttgccatccttctcaacgatgcgcacgggcgggtagctgaaacccactgctacaagttgcgcctcttctctttcttcttcgctgtcttgactgatgtcttgcatggggatatgtttggtcttccttggcttctttttggggggtatcggaggaggaggactgtcgctccgttccggagacagggaggattgtgacgtttcgctcaccattaccaactgactgtcggtagaagaacctgaccccacacggcgacaggtgtttctcttcgggggcagaggtggaggcgattgcgaagggctgcggtccgacctggaaggcggatgactggcagaaccccttccgcgttcgggggtgtgctccctgtggcggtcgcttaactgatttccttcgcggctggccattgtgttctcctaggcagagaaacaacagacatggaaactcagccattgctgtcaacatcgccacgagtgccatcacatctcgtcctcagcgacgaggaaaaggagcagagcttaagcattccaccgcccagtcctgccaccacctctaccctagaagataaggaggtcgacgcatctcatgacatgcagaataaaaaagcgaaagagtctgagacagacatcgagcaagacccgggctatgtgacaccggtggaacacgaggaagagttgaaacgctttctagagagagaggatgaaaactgcccaaaacaacgagcagataactatcaccaagatgctggaaatagggatcagaacaccgactacctcatagggcttgacggggaagacgcgctccttaaacatctagcaagacagtcgctcatagtcaaggatgcattattggacagaactgaagtgcccatcagtgtggaagagctcagccgcgcctacgagcttaacctcttttcacctcgtactccccccaaacgtcagccaaacggcacctgcgagccaaatcctcgcttaaacttttatccagcttttgctgtgccagaagtactggctacctatcacatcttttttaaaaatcaaaaaattccagtctcctgccgcgctaatcgcacccgcgccgatgccctactcaatctgggacctggttcacgcttacctgatatagcttccttggaagaggttccaaagatcttcgagggtctgggcaataatgagactcgggccgcaaatgctctgcaaaagggagaaaatggcatggatgagcatcacagcgttctggtggaattggaaggcgataatgccagactcgcagtactcaagcgaagcatcgaggtcacacacttcgcatatcccgctgtcaacctgccccctaaagtcatgacggcggtcatggaccagttactcattaagcgcgcaagtcccctttcagaagacatgcatgacccagatgcctgtgatgagggtaaaccagtggtcagtgatgagcagctaacccgatggctgggcaccgactctcccagggatttggaagagcgtcgcaagcttatgatggccgtggtgctggttaccgtagaactagagtgtctccgacgtttctttaccgattcagaaaccttgcgcaaactcgaagagaatctgcactacacttttagacacggctttgtgcggcaggcatgcaagatatctaacgtggaactcaccaacctggtttcctacatgggtattctgcatgagaatcgcctaggacaaagcgtgctgcacagcaccctgaagggggaagcccgccgtgattacatccgcgattgtgtctatctgtacctgtgccacacgtggcaaaccggcatgggtgtatggcagcaatgtttagaagaacagaacttgaaagagcttgacaagctcttacagaaatctcttaaggttctgtggacagggttcgacgagcgcaccgtcgcttccgacctggcagacctcatcttcccagagcgtctcagggttactttgcgaaacggattgcctgactttatgagccagagcatgcttaacaattttcgctctttcatcctggaacgctccggtatcctgcccgccacctgctgcgcactgccctccgactttgtgcctctcacctaccgcgagtgccccccgccgctatggagtcactgctacctgttccgtctggccaactatctctcctaccactcggatgtgatcgaggatgtgagcggagacggcttgctggagtgtcactgccgctgcaatctgtgcacgccccaccggtccctagcttgcaacccccagttgatgagcgaaacccagataataggcacctttgaattgcaaggccccagcagccaaggcgatgggtcttctcctgggcaaagtttaaaactgaccccgggactgtggacctccgcctacttgcgcaagtttgctccggaagattaccacccctatgaaatcaagttctatgaggaccaatcacagcctccaaaggccgaactttcggcctgcgtcatcacccagggggcaattctggcccaattgcaagccatccaaaaatcccgccaagaatttctactgaaaaagggtaagggggtctaccttgacccccagaccggcgaggaactcaacacaaggttccctcaggatgtcccaacgacgagaaaacaagaagttgaaggtgcagccgccgcccccagaagatatggaggaagattgggacagtcaggcagaggaggcggaggaggacagtctggaggacagtctggaggaagacagtttggaggaggaaaacgaggaggcagaggaggtggaagaagtaaccgccgacaaacagttatcctcggctgcggagacaagcaacagcgctaccatctccgctccgagtcgaggaacccggcggcgtcccagcagtagatgggacgagaccggacgcttcccgaacccaaccagcgcttccaagaccggtaagaaggatcggcagggatacaagtcctggcgggggcataagaatgccatcatctcctgcttgcatgagtgcgggggcaacatatccttcacgcggcgctacttgctattccaccatggggtgaactttccgcgcaatgttttgcattactaccgtcacctccacagcccctactatagccagcaaatcccggcagtctcgacagataaagacagcggcggcgacctccaacagaaaaccagcagcggcagttagaaaatacacaacaagtgcagcaacaggaggattaaagattacagccaacgagccagcgcaaacccgagagttaagaaatcggatctttccaaccctgtatgccatcttccagcagagtcggggtcaagagcaggaactgaaaataaaaaaccgatctctgcgttcgctcaccagaagttgtttgtatcacaagagcgaagatcaacttcagcgcactctcgaggacgccgaggctctcttcaacaagtactgcgcgctgactcttaaagagtaggcagcgaccgcgcttattcaaaaaaggcgggaattacatcatcctcgacatgagtaaagaaattcccacgccttacatgtggagttatcaaccccaaatgggattggcggcaggcgcctcccaggactactccacccgcatgaattggctcagcgccgggccttctatgatttctcgagttaatgatatacgcgcctaccgaaaccaaatacttttggaacagtcagctcttaccaccacgccccgccaacaccttaatcccagaaattggcccgccgccctagtgtaccaggaaagtcccgctcccaccactgtattacttcctcgagacgcccaggccgaagtccaaatgactaatgcaggtgcgcagttagctggcggctccaccctatgtcgtcacaggcctcggcataatataaaacgcctgatgatcagaggccgaggtatccagctcaacgacgagtcggtgagctctccgcttggtctacgaccagacggaatctttcagattgccggctgcgggagatcttccttcacccctcgtcaggctgttctgactttggaaagttcgtcttcgcaaccccgctcgggcggaatcgggaccgttcaatttgtggaggagtttactccctctgtctacttcaaccccttctccggatctcctgggcattacccggacgagttcataccgaacttcgacgcgattagcgagtcagtggacggctacgattgatgtctggtgacgcggctgagctatctcggctgcgacatctagaccactgccgccgctttcgctgctttgcccgggaactcattgagttcatctacttcgaactccccaaggatcaccctcaaggtccggcccacggagtgcggatttctatcgaaggcaaaatagactctcgcctgcaacgaattttctcccagcggcccgtgctgatcgagcgagaccagggaaacaccacggtttccatctactgcatttgtaatcaccccggattgcatgaaagcctttgctgtcttatgtgtactgagtttaataaaaactgaattaagactctcctacggactgccgcttcttcaacccggattttacaaccagaagaacgaaacttttcctgtcgtccaggactctgttaacttcacctttcctactcacaaactagaagctcaacgactacaccgcttttccagaagcattttccctactaatactactttcaaaaccggaggtgagctccaaggtcttcctacagaaaacccttgggtggaagcgggccttgtagtgctaggaattcttgcgggtgggcttgtgattattctttgctacctatacacaccttgcttcactttcttagtggtgttgtggtattggtttaaaaaatggggcccatactagtcttgcttgttttactttcgcttttggaaccgggttctgccaattacgatccatgtctagacttcgacccagaaaactgcacacttacttttgcacccgacacaagccgcatctgtggagttcatcgcctctcttacgaacttggcccccaacgacaaaaatttacctgcatggtgggaatcaaccccatagttatcacccagcaaagtggagatactaagggttgcattcactgctcctgcgattccatcgagtgcacctacaccctgctgaagaccctatgcggcctaagagacctgctaccaatgaattaaaaaatgattaataaaaaatcacttacttgaaatcagcaataaggtctctgttgaaattttctcccagcagcacctcacttccctcttcccaactctggtattctaaaccccgttcagcggcatactttctccatactttaaaggggatgtcaaattttagctcctctcctgtacccacaatcttcatgtctttcttcccagatgaccaagagagtccggctcagtgactccttcaaccctgtctacccctatgaagatgaaagcacctcccaacacccctttataaacccagggtttatttccccaaatggcttcacacaaagcccaaacggagttcttactttaaaatgtttaaccccactaacaaccacaggcggatctctacagctaaaagtgggagggggacttacagtggatgacaccaacggttttttgaaagaaaacataagtgccaccacaccactcgttaagactggtcactctataggtttaccactaggagccggattgggaacgaatgaaaataaactttgtatcaaattaggacaaggacttacattcaattcaaacaacatttgcattgatgacaatattaacaccttatggacaggagtcaaccccaccgaagccaactgtcaaatcatgaactccagtgaatctaatgattgcaaattaattctaacactagttaaaactggagcactagtcactgcatttgtttatgttataggagtatctaacaattttaatatgctaactacacacagaaatataaattttactgcagagctgtttttcgattctactggtaatttactaactagactctcatccctcaaaactccacttaatcataaatcaggacaaaacatggctactggtgccattactaatgctaaaggtttcatgcccagcacgactgcctatcctttcaatgataattctagagaaaaagaaaactacatttacggaacttgttactacacagctagtgatcgcactgcttttcccattgacatatctgtcatgcttaaccgaagagcaataaatgacgagacatcatattgtattcgtataacttggtcctggaacacaggagatgccccagaggtgcaaacctctgctacaaccctagtcacctccccatttaccttttactacatcagagaagacgactgacaaataaagtttgcgatcgccaggcccaccatgccactcctcctgctcctccctctcctttgggccggcgctctcgccaattgggtcaacgtgatcagcgacctcaagaaaatcgaggacctcatccagtccatgcacatcgacgccacactgtacaccgagagcgacgtgcatcctagctgtaaggtcaccgctatgaaatgtttcctgctcgaacttcaggtcatctccctggaaagcggcgacgccagcatccacgacaccgtggagaacctcattatcctggccaataatagcctttccagcaacggcaacgtcaccgagtccggctgtaaggagtgcgaagagctcgaagagaagaacatcaaggagttcctgcaaagcttcgtccacatcgtgcagatgtttattaatacctccggctccggcgaagggcggggcagcctcctgacctgtggagatgtggaagaaaaccccggcccagctttaacattcgccttgctggtcgccctgctcgtcctgtcctgtaaatccagttgttccgtgggttgcgacctcccacagacacattccctcggctctagacgcacattaatgctgctcgcccaaatgagacggatttccctgttttcatgtctgaaagataggcacgatttcggcttccctcaagaagaattcggaaatcaatttcagaaagccgagacaattcccgtgcttcacgaaatgattcaacaaatttttaacctgttctccaccaaagatagctccgccgcctgggacgaaacactgctcgataagttttataccgagctttatcaacagctcaacgatctcgaggcttgcgtcattcaaggcgtcggcgttaccgaaaccccactcatgaaagaagattctatcctcgccgtccggaagtattttcagcgcattaccctgtacctcaaggaaaaaaagtattccccctgcgcttgggaagtcgttcgcgctgagattatgaggtccttctcactctctaccaatctccaggagagccttcggtccaaagagggcagtggccaatgcaccaactacgccctgcttaagctggccggcgacgtcgaaagtaatcccggcccagcccaatctctcgcacttagtctgctcattctcgtgcttgctttcgggattccaagaactcagggaagcgacggcggtgcccaagattgctgtctgaaatatagtcagagaaaaatccctgctaaagtggttcggagttatcgcaaacaagagcccagtttggggtgttcaattcccgcaattctctttttaccacggaaacggtcccaagctgaactgtgcgctgatcctaaagaactgtgggtccaacagctcatgcaacaccttgataaaaccccttctccccaaaagcctgctcaagggtgtagaaaagatagaggagcttctaaaaccggtaaaaagggcaaagggtctaagggatgtaaaagaaccgaacgctcccaaactcccaagggccccggcagtggcgtcaagcaaacccttaacttcgatctgctgaaactggccggcgatgtcgaatctaatcccggccccatgtgccatcaacaacttgtgatttcctggttcagcctcgtgttcctcgcctcccctctggtcgctatctgggagctcaaaaaggacgtctacgtggtcgagcttgactggtaccccgacgctccaggcgagatggtcgtgctgacatgcgatacacccgaggaggacggcattacatggacactggatcaatccagcgaagtgctgggatccggaaagacactcacaattcaggtgaaggaattcggcgacgccggacaatatacatgccataagggcggagaagtgctgtcccactccctgctcctcttacataagaaagaggacggcatctggtctaccgacatcctcaaagatcaaaaggagccaaagaacaaaacattcctgcgctgtgaagctaaaaactactccggcagatttacatgttggtggctcaccaccattagcaccgacctcacctttagcgtgaagagttcccggggatccagcgatcctcagggcgtcacctgtggcgccgcaaccctgtccgccgaacgggtgcggggcgataataaagaatacgaatattccgtcgaatgtcaagaagatagcgcttgtcccgccgcagaagaaagcctccctatcgaagtgatggtcgacgctgtgcataaactgaaatacgagaattatacaagttcctttttcattcgggatattatcaagcccgatcccccaaaaaatctccaactcaaacccctcaaaaactccagacaagtcgaagtgtcctgggaatatcccgatacatggagcaccccccactcttattttagcctcaccttttgtgtgcaagtgcaaggaaaatccaaacgcgagaaaaaggaccgcgtgtttaccgataaaacatccgctaccgtgatttgtcggaagaacgcttccatcagtgtccgcgctcaagatcggtattactcctcctcctggagtgagtgggcctccgtcccatgtagcggcggaggtgggagtggcggcgggggttccggagggggtggctcccgcaatctgcctgtcgctacccccgatcccggcatgtttccctgtctgcatcatagccagaatctcctcagagctgtgagtaatatgctgcaaaaagctcgccagaccctggagttctatccctgtacctccgaggaaatcgaccacgaggacattaccaaggacaagacatctaccgtcgaagcttgcctgccccttgagctgacaaaaaacgaaagctgtctgaactctcgcgaaacatcctttatcaccaacggaagctgtctcgcttctcggaaaacatccttcatgatggctctctgtctgagcagcatctacgaggatcttaaaatgtatcaagtcgaatttaagacaatgaacgccaaactcctgatggacccaaaacggcaaattttcctggaccagaatatgctcgccgtgatcgacgaactcatgcaagctctcaactttaatagcgaaaccgtcccccagaagtcttctctcgaggagcccgacttctacaagaccaagattaaactgtgtatcctgctccacgcctttcggatccgcgccgtcaccatcgacagggtcatgtcctacctgaacgcctcttaagctagcttgactgactgagatacagcgtaccttcagctcacagacatgataagatacattgatgagtttggacaaaccacaactagaatgcagtgaaaaaaatgctttatttgtgaaatttgtgatgctattgctttatttgtaaccattataagctgcaataaacaagttaacaacaacaattgcattcattttatgtttcaggttcagggggaggtgtgggaggttttttaaagcaagtaaaacctctacaaatgtggtagtcgtcagctatcctgcaggaacttgtttatttgaaaatcaattcacaaaatccgagtagttattttgcctcccccttcccatttaacagaatacaccaatctctccccacgcacagctttaaacatttggataccattagatatagacatggttttagattccacattccaaacagtttcagagcgagccaatctggggtcagtgatagataaaaatccatcgggatagtcttttaaagcgctttcacagtccaactgctgcggatgcgactccggagtctggatcacggtcatctggaagaagaacgatgggaatcataatccgaaaacggtatcggacgattgtgtctcatcaaacccacaagcagccgctgtctgcgtcgctccgtgcgactgctgtttatgggatcagggtccacagtgtcctgaagcatgattttaatagcccttaacatcaactttctggtgcgatgcgcgcagcaacgcattctgatttcactcaaatctttgcagtaggtacaacacattattacaatattgtttaataaaccataattaaaagcgctccagccaaaactcatatctgatataatcgcccctgcatgaccatcataccaaagtttaatataaattaaatgacgttccctcaaaaacacactacccacatacatgatctcttttggcatgtgcatattaacaatctgtctgtaccatggacaacgttggttaatcatgcaacccaatataaccttccggaaccacactgccaacaccgctcccccagccatgcattgaagtgaaccctgctgattacaatgacaatgaagaacccaattctctcgaccgtgaatcacttgagaatgaaaaatatctatagtggcacaacatagacataaatgcatgcatcttctcataatttttaactcctcaggatttagaaacatatcccagggaataggaagctcttgcagaacagtaaagctggcagaacaaggaagaccacgaacacaacttacactatgcatagtcatagtatcacaatctggcaacagcgggtggtcttcagtcatagaagctcgggtttcattttcctcacaacgtggtaactgggctctggtgtaagggtgatgtctggcgcatgatgtcgagcgtgcgcgcaaccttgtcataatggagttgcttcctgacattctcgtattttgtatagcaaaacgcggccctggcagaacacactcttcttcgccttctatcctgccgcttagcgtgttccgtgtgatagttcaagtacaaccacactcttaagttggtcaaaagaatgctggcttcagttgtaatcaaaactccatcgcatctaatcgttctgaggaaatcatccaagcaatgcaactggattgtgtttcaagcaggagaggagagggaagagacggaagaaccatgttaatttttattccaaacgatctcgcagtacttcaaattgtagatcgcgcagatggcatctctcgcccccactgtgttggtgaaaaagcacagctagatcaaaagaaatgcgattttcaaggtgctcaacggtggcttccagcaaagcctccacgcgcacatccaagaacaaaagaataccaaaagaaggagcattttctaactcctcaatcatcatattacattcctgcaccattcccagataattttcagctttccagccttgaattattcgtgtcagttcttgtggtaaatccaatccacacattacaaacaggtcccggagggcgccctccaccaccattcttaaacacaccctcataatgacaaaatatcttgctcctgtgtcacctgtagcgaattgagaatggcaacatcaattgacatgcccttggctctaagttcttctttaagttctagttgtaaaaactctctcatattatcaccaaactgcttagccagaagccccccgggaacaagagcaggggacgctacagtgcagtacaagcgcagacctccccaattggctccagcaaaaacaagattggaataagcatattgggaaccgccagtaatatcatcgaagttgctggaaatataatcaggcagagtttcttgtaaaaattgaataaaagaaaaatttgccaaaaaaacattcaaaacctctgggatgcaaatgcaataggttaccgcgctgcgctccaacattgttagttttgaattagtctgcaaaaataaaaaaaaaaacaagcgtcatatcatagtagcctgacgaacagatggataaatcagtctttccatcacaagacaagccacagggtctccagctcgaccctcgtaaaacctgtcatcatgattaaacaacagcaccgaaagttcctcgcggtgaccagcatgaataattcttgatgaagcatacaatccagacatgttagcatcagttaacgagaaaaaacagccaacatagcctttgggtataattatgcttaatcgtaagtatagcaaagccacccctcgcggatacaaagtaaaaggcacaggagaataaaaaatataattatttctctgctgctgttcaggcaacgtcgcccccggtccctctaaatacacatacaaagcctcatcagccatggcttaccagacaaagtacagcgggcacacaaagcacaagctctaaagtgactctccaacctctccacaatatatatatacacaagccctaaactgacgtaatgggagtaaagtgtaaaaaatcccgccaaacccaacacacaccccgaaactgcgtcaccagggaaaagtacagtttcacttccgcaatcccaacaggcgtaacttcctctttctcacggtacgtgatatcccactaacttgcaacgtcattttcccacggtcgcaccgccccttttagccgttaaccccacagccaatcaccacacgatccacactttttaaaatcacctcatttacatattggcaccattccatctataaggtatattatatagataga

SEQ ID NO: 217 - DNA, 35779 bp, Artificial Sequence
  Genome sequence of NG-782 virus
tctatctatataatataccttatagatggaatggtgccaatatgtaaatgaggtgattttaaaaagtgtggatcgtgtggtgattggctgtggggttaacggctaaaaggggcggtgcgaccgtgggaaaatgacgttttgtgggggtggagtttttttgcaagttgtcgcgggaaatgtgacgcataaaaaggcttttttctcacggaactacttagttttcccacggtatttaacaggaaatgaggtagttttgaccggatgcaagtgaaaattgttgattttcgcgcgaaaactgaatgaggaagtgtttttctgaataatgtggtatttatggcagggtggagtatttgttcagggccaggtagactttgacccattacgtggaggtttcgattaccgtgttttttacctgaatttccgcgtaccgtgtcaaagtcttctgtttttacgtaggtgtcagctgatcgctagggtatttatacctcagggtttgtgtcaagaggccactcttgagtgccagcgagaagagttttctcctctgcgccggcagtttaataataaaaaaatgagagatttgcgatttctgcctcaggaaataatctctgctgagactggaaatgaaatattggagcttgtggtgcacgccctgatgggagacgatccggagccacctgtgcagctttttgagcctcctacgcttcaggaactgtatgatttagaggtagagggatcggaggattctaatgaggaagctgtaaatggcttttttaccgattctatgcttttagctgctaatgaagggttagaattagatccgcctttggacacttttgatactccaggggtaattgtggaaagcggtacaggtgtaagaaaattacctgatttgagttccgtggactgtgatttgcactgctatgaagacgggtttcctccgagtgatgaggaggaccatgaaaaggagcagtccatgcagactgcagcgggtgagggagtgaaggctgccaatgttggttttcagttggattgcccggagcttcctggacatggctgtaagtcttgtgaatttcacaggaaaaatactggagtaaaggaactgttatgttcgctttgttatatgagaacgcactgccactttatttacagtaagtgtgtttaagttaaaatttaaaggaatatgctgtttttcacatgtatattgagtgtgagttttgtgcttcttattataggtcctgtgtctgatgctgatgaatcaccatctcctgattctactacctcacctcctgagattcaagcacctgttcctgtggacgtgcgcaagcccattcctgtgaagcttaagcctgggaaacgtccagcagtggaaaaacttgaggacttgttacagggtggggacggacctttggacttgagtacacggaaacgtccaagacaataagtgttccatatccgtgtttacttaaggtgacgtcaatatttgtgtgacagtgcaatgtaataaaaatatgttaactgttcactggtttttattgctttttgggcggggactcaggtatataagtagaagcagacctgtgtggttagctcataggagctggctttcatccatggaggtttgggccattttggaagaccttaggaagactaggcaactgttagagaacgcttcggacggagtctccggtttttggagattctggttcgctagtgaattagctagggtagtttttaggataaaacaggactataaacaagaatttgaaaagttgttggtagattgcccaggactttttgaagctcttaatttgggccatcaggttcactttaaagaaaaagttttatcagttttagacttttcaaccccaggtagaactgctgctgctgtggcttttcttacttttatattagataaatggatcccgcagactcatttcagcaggggatacgttttggatttcatagccacagcattgtggagaacatggaaggttcgcaagatgaggacaatcttaggttactggccagtgcagcctttgggtgtagcgggaatcctgaggcatccaccggtcatgccagcggttctggaggaggaacagcaagaggacaacccgagagccggcctggaccctccagtggaggaggcggagtagctgacttgtctcctgaactgcaacgggtgcttactggatctacgtccactggacgggataggggcgttaagagggagagggcatctagtggtactgatgctagatctgagttggctttaagtttaatgagtcgcagacgtcctgaaaccatttggtggcatgaggttcagaaagagggaagggatgaagtttctgtattgcaggagaaatattcactggaacaggtgaaaacatgttggttggagcctgaggatgattgggaggtggccattaaaaattatgccaagatagctttgaggcctgataaacagtataagattactagacggattaatatccggaatgcttgttacatatctggaaatggggctgaggtggtaatagatactcaagacaaggcagttattagatgctgcatgatggatatgtggcctggggtagtcggtatggaagcagtaacttttgtaaatgttaagtttaggggagatggttataatggaatagtgtttatggccaataccaaacttatattgcatggttgtagcttttttggtttcaacaatacctgtgtagatgcctggggacaggttagtgtacggggatgtagtttctatgcgtgttggattgccacagctggcagaaccaagagtcaattgtctctgaagaaatgcatatttcaaagatgtaacctgggcattctgaatgaaggcgaagcaagggtccgccactgcgcttctacagatactggatgttttattttgattaagggaaatgccagcgtaaagcataacatgatttgcggtgcttccgatgagaggccttatcaaatgctcacttgtgctggtgggcattgtaatatgctggctactgtgcatattgtttcccatcaacgcaaaaaatggcctgtttttgatcacaatgtgatgacgaagtgtaccatgcatgcaggtgggcgtagaggaatgtttatgccttaccagtgtaacatgaatcatgtgaaagtgttgttggaaccagatgccttttccagaatgagcctaacaggaatttttgacatgaacatgcaaatctggaagatcctgaggtatgatgatacgagatcgagggtacgcgcatgcgaatgcggaggcaagcatgccaggttccagccggtgtgtgtagatgtgactgaagatctcagaccggatcatttggttattgcccgcactggagcagagttcggatccagtggagaagaaactgactaaggtgagtattgggaaaactttggggtgggattttcagatggacagattgagtaaaaatttgttttttctgtcttgcagctgtcatgagtggaaacgcttcttttaaggggggagtcttcagcccttatctgacagggcgtctcccatcctgggcaggagttcgtcagaatgttatgggatctactgtggatggaagacccgtccaacccgccaattcttcaacgctgacctatgctactttaagttcttcacctttggacgcagctgcagctgccgccgccgcttctgttgccgctaacactgtgcttggaatgggttactatggaagcatcatggctaattccacttcctctaataacccttctaccctgactcaggacaagttacttgtccttttggcccagctggaggctttgacccaacgtctgggtgaactttctcagcaggtggtcgagttgcgagtacaaactgagtctgctgtcggcacggcaaagtctaaataaaaaaatcccagaatcaatgaataaataaacaagcttgttgttgatttaaaatcaagtgtttttatttcatttttcgcgcacggtatgccctagaccaccgatctctatcattgagaactcggtggattttttccaggatcctatagaggtgggattgaatgtttagatacatgggcattaggccgtctttggggtggagatagctccattgaagggattcatgctccggggtagtgttgtaaatcacccagtcataacaaggtcgcagtgcatggtgttgcacaatatcttttagaagtaggctgattgccacagataagcccttggtgtaggtgtttacaaaccggttgagctgggatgggtgcattcggggtgaaattatgtgcattttggattggatttttaagttggcaatattgccgccaagatcccgtcttgggttcatgttatgaaggaccaccaagacggtgtatccggtacatttaggaaatttatcgtgcagcttggatggaaaagcgtggaaaaatttggagacacccttgtgtcctccaagattttccatgcactcatccatgataatagcaatggggccgtgggcagcggcgcgggcaaacacgttccgtgggtctgacacatcatagttatgttcctgagttaaatcatcataagccattttaatgaatttggggcggagagtaccagattggggtatgaatgttccttcgggccccggagcatagttcccctcacagatttgcatttcccaagctttcagttccgagggtggaatcatgtccacctggggggctatgaaaaacaccgtttctggggcgggggtgattaattgtgatgatagcaaatttctgagcaattgagatttgccacatccggtggggccataaatgattccgattacgggttgcaggtggtagtttagggaacggcaactgccgtcttctcgaagcaagggggccacctcgttcatcatttcccttacatgcatattttcccgcaccaaatccattaggaggcgctctcctcctagtgatagaagttcttgtagtgaggaaaagtttttcagcggtttcagaccgtcagccatgggcattttggagagagtttgctgcaaaagttctagtctgttccacagttcagtgatgtgttctatggcatctcgatccagcagacctcctcgtttcgcgggtttggacggctcctggaatagggtatgagacgatgggcgtccagcgctgccagggttcggtccttccagggtctcagtgttcgagtcagggttgtttccgtcacagtgaaggggtgtgcgcctgcttgggcgcttgccagggtgcgcttcagactcatcctgctggtcgaaaacttctgtcgcttggcgccctgtatgtcggccaagtagcagtttaccatgagttcgtagttgagcgcctcggctgcgtggcctttggcgcggagcttacctttggaagttttcttgcataccgggcagtataggcatttcagcgcatacaacttgggcgcaaggaaaacggattctggggagtatgcatctgcgccgcaggaggcgcaaacagtttcacattccaccagccaggttaaatccggttcattggggtcaaaaacaagttttccgccatattttttgatgcgtttcttacctttggtctccatgagttcgtgtcctcgttgagtgacaaacaggctgtccgtgtccccgtagactgattttacaggcctcttctccagtggagtgcctcggtcttcttcgtacaggaactctgaccactctgatacaaaggcgcgcgtccaggccagcacaaaggaggctatgtgggaggggtagcgatcgttgtcaaccagggggtccaccttttccaaagtatgcaaacacatgtcaccctcttcaacatccaggaatgtgattggcttgtaggtgtatttcacgtgacctggggtccccgctgggggggtataaaagggggcggttctttgctcttcctcactgtcttccggatcgctgtccaggaacgtcagctgttggggtaggtattccctctcgaaggcgggcatgacctctgcactcaggttgtcagtttctaagaacgaggaggatttgatattgacagtgccggttgagatgcctttcatgaggttttcgtccatctggtcagaaaacacaatttttttattgtcaagtttggtggcaaatgatccatacagggcgttggataaaagtttggcaatggatcgcatggtttggttcttttccttgtccgcgcgctctttggcggcgatgttgagttggacatactcgcgtgccaggcacttccattcggggaagatagttgttaattcatctggcacgattctcacttgccaccctcgattatgcaaggtaattaaatccacactggtggccacctcgcctcgaaggggttcattggtccaacagagcctacctcctttcctagaacagaaagggggaagtgggtctagcataagttcatcgggagggtctgcatccatggtaaagattcccggaagtaaatccttatcaaaatagctgatgggagtggggtcatctaaggccatttgccattctcgagctgccagtgcgcgctcatatgggttaaggggactgccccatggcatgggatgggtgagtgcagaggcatacatgccacagatgtcatagacgtagatgggatcctcaaagatgcctatgtaggttggatagcatcgcccccctctgatacttgctcgcacatagtcatatagttcatgtgatggcgctagcagccccggacccaagttggtgcgattgggtttttctgttctgtagacgatctggcgaaagatggcgtgagaattggaagagatggtgggtctttgaaaaatgttgaaatgggcatgaggtagacctacagagtctctgacaaagtgggcataagattcttgaagcttggttaccagttcggcggtgacaagtacgtctagggcgcagtagtcaagtgtttcttgaatgatgtcataacctggttggtttttcttttcccacagttcgcggttgagaaggtattcttcgcgatccttccagtactcttctagcggaaacccgtctttgtctgcacggtaagatcctagcatgtagaactgattaactgccttgtaagggcagcagcccttctctacgggtagagagtatgcttgagcagcttttcgtagcgaagcgtgagtaagggcaaaggtgtctctgaccatgactttgaggaattggtatttgaagtcgatgtcgtcacaggctccctgttcccagagttggaagtctacccgtttcttgtaggcggggttgggcaaagcgaaagtaacatcattgaagagaatcttgccggccctgggcatgaaattgcgagtgatgcgaaaaggctgtggtacttccgctcggttattgataacctgggcagctaggacgatctcgtcgaaaccgttgatgttgtgtcctacgatgtataattctatgaaacgcggcgtgcctctgacgtgaggtagcttactgagctcatcaaaggttaggtctgtggggtcagataaggcgtagtgttcgagagcccattcgtgcaggtgaggattcgctttaaggaaggaggaccagaggtccactgccagtgctgtttgtaactggtcccggtactgacgaaaatgccgtccgactgccattttttctggggtgacgcaatagaaggtttgggggtcctgccgccagcgatcccacttgagttttatggcgaggtcataggcgatgttgacgagccgctggtctccagagagtttcatgaccagcatgaaggggattagctgcttgccaaaggaccccatccaggtgtaggtttccacatcgtaggtgagaaagagcctttctgtgcgaggatgagagccaatcgggaagaactggatctcctgccaccagttggaggaatggctgttgatgtgatggaagtagaactccctgcgacgcgccgagcattcatgcttgtgcttgtacagacggccgcagtagtcgcagcgttgcacgggttgtatctcgtgaatgagttgtacctggcttcccttgacgagaaatttcagtgggaagccgaggcctggcgattgtatctcgtgctttactatgttgtctgcatcggcctgttcatcttctgtctcgatggtggtcatgctgacgagccctcgcgggaggcaagtccagacctcggcgcggcaggggcggagctcgaggacgagagcgcgcaggctggagctgtccagggtcctgagacgctgcggactcaggttagtaggcagtgtcaggagattaacttgcatgatcttttggagggcgtgcgggaggttcagatagtacttgatctcaacgggtccgttggtggagatgtcgatggcttgcagggttccgtgtcccttgggcgctaccaccgtgcccttgtttttcattttggacggcggtggctctgttgcttcttgcatgtttagaagcggtgtcgagggcgcgcaccgggcggcaggggcggctcgggacccggcggcatggctggcagtggtacgtcggcgccgcgcgcgggtaggttctggtactgcgccctgagaagactcgcatgcgcgacgacgcggcggttgacatcctggatctgacgcctctgggtgaaagctaccggccccgtgagcttgaacctgaaagagagttcaacagaatcaatctcggtatcgttgacggcggcttgcctaaggatttcttgcacgtcaccagagttgtcctggtaggcgatctccgccatgaactgctcgatctcttcctcttgaagatctccgcggcccgctctctcgacggtggccgcgaggtcgttggagatgcgcccaatgagttgagagaatgcattcatgcccgcctcgttccagacgcggctgtagaccacggcccccacgggatctctcgcgcgcatgaccacctgggcgaggttgagctccacgtggcgggtgaagaccgcatagttgcataggcgctggaaaaggtagttgagtgtggtggcgatgtgctcggtgacgaagaaatacatgatccatcgtctcagcggcatctcgctgacatcgcccagagcttccaagcgctccatggcctcgtagaagtccacggcaaaattaaaaaactgggagtttcgcgcggacacggtcaactcctcttccagaagacggataagttcggcgatggtggtgcgcacctcgcgctcgaaagcccctgggatttcttcctcaatctcttcttcttccactaacatctcttcctcttcaggtggggctgcaggaggagggggaacgcggcgacgccggcggcgcacgggcagacggtcgatgaatctttcaatgacctctccgcggcggcggcgcatggtttcagtgacggcgcggccgttctcgcgcggtcgcagagtaaaaacaccgccgcgcatctccttaaagtggtgactgggaggttctccgtttgggagggagagggcgctgattatacattttattaattggcccgtagggactgcacgcagagatctgatcgtgtcaagatccacgggatctgaaaacctttcgacgaaagcgtctaaccagtcacagtcacaaggtaggctgagtacggcttcttgtgggcgggggtggttatgtgttcggtctgggtcttctgtttcttcttcatctcgggaaggtgagacgatgctgctggtgatgaaattaaagtaggcagttctaagacggcggatggtggcgaggagcaccaggtctttgggtccggcttgctggatacgcaggcgattggccattccccaagcattatcctgacatctagcaagatctttgtagtagtcttgcatgagccgttctacgggcacttcttcctcacccgttctgccatgcatacgtgtgagtccaaatccgcgcattggttgtaccagtgccaagtcagctacgactctttcggcgaggatggcttgctgtacttgggtaagggtggcttgaaagtcatcaaaatccacaaagcggtggtaagctcctgtattaatggtgtaagcacagttggccatgactgaccagttaactgtctggtgaccagggcgcacgagctcggtgtatttaaggcgcgaataggcgcgggtgtcaaagatgtaatcgttgcaggtgcgcaccagatactggtaccctataagaaaatgcggcggtggttggcggtagagaggccatcgttctgtagctggagcgccaggggcgaggtcttccaacataaggcggtgatagccgtagatgtacctggacatccaggtgattcctgcggcggtagtagaagcccgaggaaactcgcgtacgcggttccaaatgttgcgtagcggcatgaagtagttcattgtaggcacggtttgaccagtgaggcgcgcgcagtcattgatgctctatagacacggagaaaatgaaagcgttcagcgactcgactccgtagcctggaggaacgtgaacgggttgggtcgcggtgtaccccggttcgagacttgtactcgagccggccggagccgcggctaacgtggtattggcactcccgtctcgacccagcctacaaaaatccaggatacggaatcgagtcgttttgctggtttccgaatggcagggaagtgagtcctattttttttttttgccgctcagatgcatcccgtgctgcgacagatgcgcccccaacaacagcccccctcgcagcagcagcagcagcaatcacaaaaggctgtccctgcaactactgcaactgccgccgtgagcggtgcgggacagcccgcctatgatctggacttggaagagggcgaaggactggcacgtctaggtgcgccttcacccgagcggcatccgcgagttcaactgaaaaaagattctcgcgaggcgtatgtgccccaacagaacctatttagagacagaagcggcgaggagccggaggagatgcgagcttcccgctttaacgcgggtcgtgagctgcgtcacggtttggaccgaagacgagtgttgcgggacgaggatttcgaagttgatgaaatgacagggatcagtcctgccagggcacacgtggctgcagccaaccttgtatcggcttacgagcagacagtaaaggaagagcgtaacttccaaaagtcttttaataatcatgtgcgaaccctgattgcccgcgaagaagttacccttggtttgatgcatttgtgggatttgatggaagctatcattcagaaccctactagcaaacctctgaccgcccagctgtttctggtggtgcaacacagcagagacaatgaggctttcagagaggcgctgctgaacatcaccgaacccgaggggagatggttgtatgatcttatcaacattctacagagtatcatagtgcaggagcggagcctgggcctggccgagaaggtggctgccatcaattactcggttttgagcttgggaaaatattacgctcgcaaaatctacaagactccatacgttcccatagacaaggaggtgaagatagatgggttctacatgcgcatgacgctcaaggtcttgaccctgagcgatgatcttggggtgtatcgcaatgacagaatgcatcgcgcggttagcgccagcaggaggcgcgagttaagcgacagggaactgatgcacagtttgcaaagagctctgactggagctggaaccgagggtgagaattacttcgacatgggagctgacttgcagtggcagcctagtcgcagggctctgagcgccgcgacggcaggatgtgagcttccttacatagaagaggcggatgaaggcgaggaggaagagggcgagtacttggaagactgatggcacaacccgtgttttttgctagatggaacagcaagcaccggatcccgcaatgcgggcggcgctgcagagccagccgtccggcattaactcctcggacgattggacccaggccatgcaacgtatcatggcgttgacgactcgcaaccccgaagcctttagacagcaaccccaggccaaccgtctatcggccatcatggaagctgtagtgccttcccgctctaatcccactcatgagaaggtcctggccatcgtgaacgcgttggtggagaacaaagctattcgtccagatgaggccggactggtatacaacgctctcttagaacgcgtggctcgctacaacagtagcaatgtgcaaaccaatttggaccgtatgataacagatgtacgcgaagccgtgtctcagcgcgaaaggttccagcgtgatgccaacctgggttcgctggtggcgttaaatgctttcttgagtactcagcctgctaatgtgccgcgtggtcaacaggattatactaactttttaagtgctttgagactgatggtatcagaagtacctcagagcgaagtgtatcagtccggtcctgattacttctttcagactagcagacagggcttgcagacggtaaatctgagccaagcttttaaaaaccttaaaggtttgtggggagtgcatgccccggtaggagaaagagcaaccgtgtctagcttgttaactccgaactcccgcctattattactgttggtagctcctttcaccgacagcggtagcatcgaccgtaattcctatttgggttacctactaaacctgtatcgcgaagccatagggcaaagtcaggtggacgagcagacctatcaagaaattacccaagtcagtcgcgctttgggacaggaagacactggcagtttggaagccactctgaacttcttgcttaccaatcggtctcaaaagatccctcctcaatatgctcttactgcggaggaggagaggatccttagatatgtgcagcagagcgtgggattgtttctgatgcaagagggggcaactccgactgcagcactggacatgacagcgcgaaatatggagcccagcatgtatgccagtaaccgacctttcattaacaaactgctggactacttgcacagagctgccgctatgaactctgattatttcaccaatgccatcttaaacccgcactggctgcccccacctggtttctacacgggcgaatatgacatgcccgaccctaatgacggatttctgtgggacgacgtggacagcgatgttttttcacctctttctgatcatcgcacgtggaaaaaggaaggcggcgatagaatgcattcttctgcatcgctgtccggggtcatgggtgctaccgcggctgagcccgagtctgcaagtccttttcctagtctacccttttctctacacagtgtacgtagcagcgaagtgggtagaataagtcgcccgagtttaatgggcgaagaggagtatctaaacgattccttgctcagaccggcaagagaaaaaaatttcccaaacaatggaatagaaagtttggtggataaaatgagtagatggaagacttatgctcaggatcacagagacgagcctgggatcatggggattacaagtagagcgagccgtagacgccagcgccatgacagacagaggggtcttgtgtgggacgatgaggattcggccgatgatagcagcgtgctggacttgggtgggagaggaaggggcaacccgtttgctcatttgcgccctcgcttgggtggtatgttgtaaaaaaaaataaaaaaaaaactcaccaaggccatggcgacgagcgtacgttcgttcttctttattatctgtgtctagtataatgaggcgagtcgtgctaggcggagcggtggtgtatccggagggtcctcctccttcgtacgagagcgtgatgcagcagcagcaggcgacggcggtgatgcaatccccactggaggctccctttgtgcctccgcgatacctggcacctacggagggcagaaacagcattcgttattcggaactggcacctcagtacgataccaccaggttgtatctggtggacaacaagtcggcggacattgcttctctgaactatcagaatgaccacagcaacttcttgaccacggtggtgcaaaacaatgactttacccctacggaagccagcacccagaccattaactttgatgaacgatcgcggtggggcggtcagctaaagaccatcatgcatactaacatgccaaacgtgaacgagtatatgtttagtaacaagttcaaagcgcgtgtgatggtgtccagaaaacctcccgacggtgctgcagttggggatacttatgatcacaagcaggatattttgaaatatgagtggttcgagtttactttgccagaaggcaacttttcagttactatgactattgatttgatgaacaatgccatcatagataattacttgaaagtgggtagacagaatggagtgcttgaaagtgacattggtgttaagttcgacaccaggaacttcaagctgggatgggatcccgaaaccaagttgatcatgcctggagtgtatacgtatgaagccttccatcctgacattgtcttactgcctggctgcggagtggattttaccgagagtcgtttgagcaaccttcttggtatcagaaaaaaacagccatttcaagagggttttaagattttgtatgaagatttagaaggtggtaatattccggccctcttggatgtagatgcctatgagaacagtaagaaagaacaaaaagccaaaatagaagctgctacagctgctgcagaagctaaggcaaacatagttgccagcgactctacaagggttgctaacgctggagaggtcagaggagacaattttgcgccaacacctgttccgactgcagaatcattattggccgatgtgtctgaaggaacggacgtgaaactcactattcaacctgtagaaaaagatagtaagaatagaagctataatgtgttggaagacaaaatcaacacagcctatcgcagttggtatctttcgtacaattatggcgatcccgaaaaaggagtgcgttcctggacattgctcaccacctcagatgtcacctgcggagcagagcaggtctactggtcgcttccagacatgatgaaggatcctgtcactttccgctccactagacaagtcagtaactaccctgtggtgggtgcagagcttatgcccgtcttctcaaagagcttctacaacgaacaagctgtgtactcccagcagctccgccagtccacctcgcttacgcacgtcttcaaccgctttcctgagaaccagattttaatccgtccgccggcgcccaccattaccaccgtcagtgaaaacgttcctgctctcacagatcacgggaccctgccgttgcgcagcagtatccggggagtccaacgtgtgaccgttactgacgccagacgccgcacctgtccctacgtgtacaaggcactgggcatagtcgcaccgcgcgtcctttcaagccgcactttctaaaaaaaaaaaaaatgtccattcttatctcgcccagtaataacaccggttggggtctgcgcgctccaagcaagatgtacggaggcgcacgcaaacgttctacccaacatcctgtccgtgttcgcggacattttcgcgctccatggggcgccctcaagggccgcactcgcgttcgaaccaccgtcgatgatgtaatcgatcaggtggttgccgacgcccgtaattatactcctactgcgcctacatctactgtggatgcagttattgacagtgtagtggctgacgctcgcaactatgctcgacgtaagagccggcgaaggcgcattgccagacgccaccgagctaccactgccatgcgagccgcaagagctctgctacgaagagctagacgcgtggggcgaagagccatgcttagggcggccagacgtgcagcttcgggcgccagcgccggcaggtcccgcaggcaagcagccgctgtcgcagcggcgactattgccgacatggcccaatcgcgaagaggcaatgtatactgggtgcgtgacgctgccaccggtcaacgtgtacccgtgcgcacccgtccccctcgcacttagaagatactgagcagtctccgatgttgtgtcccagcggcgaggatgtccaagcgcaaatacaaggaagaaatgctgcaggttatcgcacctgaagtctacggccaaccgttgaaggatgaaaaaaaaccccgcaaaatcaagcgggttaaaaaggacaaaaaagaagaggaagatggcgatgatgggctggcggagtttgtgcgcgagtttgccccacggcgacgcgtgcaatggcgtgggcgcaaagttcgacatgtgttgagacctggaacttcggtggtctttacacccggcgagcgttcaagcgctacttttaagcgttcctatgatgaggtgtacggggatgatgatattcttgagcaggcggctgaccgattaggcgagtttgcttatggcaagcgtagtagaataacttccaaggatgagacagtgtcgatacccttggatcatggaaatcccacccctagtcttaaaccggtcactttgcagcaagtgttacccgtaactccgcgaacaggtgttaaacgcgaaggtgaagatttgtatcccactatgcaactgatggtacccaaacgccagaagttggaggacgttttggagaaagtaaaagtggatccagatattcaacctgaggttaaagtgagacccattaagcaggtagcgcctggtctgggggtacaaactgtagacattaagattcccactgaaagtatggaagtgcaaactgaacccgcaaagcctactgccacctccactgaagtgcaaacggatccatggatgcccatgcctattacaactgacgccgccggtcccactcgaagatcccgacgaaagtacggtccagcaagtctgttgatgcccaattatgttgtacacccatctattattcctactcctggttaccgaggcactcgctactatcgcagccgaaacagtacctcccgccgtcgccgcaagacacctgcaaatcgcagtcgtcgccgtagacgcacaagcaaaccgactcccggcgccctggtgcggcaagtgtaccgcaatggtagtgcggaacctttgacactgccgcgtgcgcgttaccatccgagtatcatcacttaatcaatgttgccgctgcctccttgcagatatggccctcacttgtcgccttcgcgttcccatcactggttaccgaggaagaaactcgcgccgtagaagagggatgttgggacgcggaatgcgacgctacaggcgacggcgtgctatccgcaagcaattgcggggtggttttttaccagccttaattccaattatcgctgctgcaattggcgcgataccaggcatagcttccgtggcggttcaggcctcgcaacgacattgacattggaaaaaaacgtataaataaaaaaaaaaaaatacaatggactctgacactcctggtcctgtgactatgttttcttagagatggaagacatcaatttttcatccttggctccgcgacacggcacgaagccgtacatgggcacctggagcgacatcggcacgagccaactgaacgggggcgccttcaattggagcagtatctggagcgggcttaaaaattttggctcaaccataaaaacatacgggaacaaagcttggaacagcagtacaggacaggcgcttagaaataaacttaaagaccagaacttccaacaaaaagtagtcgatgggatagcttccggcatcaatggagtggtagatttggctaaccaggctgtgcagaaaaagataaacagtcgtttggacccgccgccagcaaccccaggtgaaatgcaagtggaggaagaaattcctccgccagaaaaacgaggcgacaagcgtccgcgtcccgatttggaagagacgctggtgacgcgcgtagatgaaccgccttcttatgaggaagcaacgaagcttggaatgcccaccactagaccgatagccccaatggccaccggggtgatgaaaccttctcagttgcatcgacccgtcaccttggatttgccccctccccctgctgctactgctgtacccgcttctaagcctgtcgctgccccgaaaccagtcgccgtagccaggtcacgtcccgggggcgctcctcgtccaaatgcgcactggcaaaatactctgaacagcatcgtgggtctaggcgtgcaaagtgtaaaacgccgtcgctgcttttaattaaatatggagtagcgcttaacttgcctatctgtgtatatgtgtcattacacgccgtcacagcagcagaggaaaaaaggaagaggtcgtgcgtcgacgctgagttactttcaagatggccaccccatcgatgctgccccaatgggcatacatgcacatcgccggacaggatgcttcggagtacctgagtccgggtctggtgcagttcgcccgcgccacagacacctacttcaatctgggaaataagtttagaaatcccaccgtagcgccgacccacgatgtgaccaccgaccgtagccagcggctcatgttgcgcttcgtgcccgttgaccgggaggacaatacatactcttacaaagtgcggtacaccctggccgtgggcgacaacagagtgctggatatggccagcacgttctttgacattaggggtgtgttggacagaggtcccagtttcaaaccctattctggtacggcttacaactccctggctcctaaaggcgctccaaatacatctcagtggattgcagaaggtgtaaaaaatacaactggtgaggaacacgtaacagaagaggaaaccaatactactacttacacttttggcaatgctcctgtaaaagctgaagctgaaattacaaaagaaggactcccagtaggtttggaagtttcagatgaagaaagtaaaccgatttatgctgataaaacatatcagccagaacctcagctgggagatgaaacttggactgaccttgatggaaaaaccgaaaagtatggaggcagggctctcaaacccgatactaagatgaaaccatgctacgggtcctttgccaaacctactaatgtgaaaggcggtcaggcaaaacaaaaaacaacggagcagccaaatcagaaagtcgaatatgatatcgacatggagttttttgatgcggcatcgcagaaaacaaacttaagtcctaaaattgtcatgtatgcagaaaatgtaaatttggaaactccagacactcatgtagtgtacaaacctggaacagaagacacaagttccgaagctaatttgggacaacaatctatgcccaacagacccaactacattggcttcagagataactttattggacttatgtactataacagtactggtaacatgggggtgctggctggtcaagcgtctcagttaaatgcagtggttgacttgcaggacagaaacacagaactttcttaccaactcttgcttgactctctgggcgacagaaccagatactttagcatgtggaatcaggctgtggacagttatgatcctgatgtacgtgttattgaaaatcatggtgtggaagatgaacttcccaactactgttttccactggacggcataggtgttccaacaaccagttacaaatcaatagttccaaatggagacaatgcgcctaattggaaggaacctgaagtaaatggaacaagtgagatcggacagggtaatttgtttgccatggaaattaaccttcaagccaatctatggcgaagtttcctttattccaatgtggctctatatctcccagactcgtacaaatacaccccgtccaatgtcactcttccagaaaacaaaaacacctacgactacatgaacgggcgggtggtgccgccatctctagtagacacctatgtgaacattggtgccaggtggtctctggatgccatggacaatgtcaacccattcaaccaccaccgtaacgctggcttgcgttaccgatccatgcttctgggtaacggacgttatgtgcctttccacatacaagtgcctcaaaaattcttcgctgttaaaaacctgctgcttctcccaggctcctacacttatgagtggaactttaggaaggatgtgaacatggttctacagagttccctcggtaacgacctgcgggtagatggcgccagcatcagtttcacgagcatcaacctctatgctacttttttccccatggctcacaacaccgcttccacccttgaagccatgctgcggaatgacaccaatgatcagtcattcaacgactacctatctgcagctaacatgctctaccccattcctgccaatgcaaccaatattcccatttccattccttctcgcaactgggcggctttcagaggctggtcatttaccagactgaaaaccaaagaaactccctctttggggtctggatttgacccctactttgtctattctggttctattccctacctggatggtaccttctacctgaaccacacttttaagaaggtttccatcatgtttgactcttcagtgagctggcctggaaatgacaggttactatctcctaacgaatttgaaataaagcgcactgtggatggcgaaggctacaacgtagcccaatgcaacatgaccaaagactggttcttggtacagatgctcgccaactacaacatcggctatcagggcttctacattccagaaggatacaaagatcgcatgtattcatttttcagaaacttccagcccatgagcaggcaggtggttgatgaggtcaattacaaagacttcaaggccgtcgccataccctaccaacacaacaactctggctttgtgggttacatggctccgaccatgcgccaaggtcaaccctatcccgctaactatccctatccactcattggaacaactgccgtaaatagtgttacgcagaaaaagttcttgtgtgacagaaccatgtggcgcataccgttctcgagcaacttcatgtctatgggggcccttacagacttgggacagaatatgctctatgccaactcagctcatgctctggacatgacctttgaggtggatcccatggatgagcccaccctgctttatcttctcttcgaagttttcgacgtggtcagagtgcatcagccacaccgcggcatcatcgaggcagtctacctgcgtacaccgttctcggccggtaacgctaccacgtaagaagcttcttgcttcttgcaaatagcagctgcaaccatggcctgcggatcccaaaacggctccagcgagcaagagctcagagccattgtccaagacctgggttgcggaccctattttttgggaacctacgataagcgcttcccggggttcatggcccccgataagctcgcctgtgccattgtaaatacggccggacgtgagacggggggagagcactggttggctttcggttggaacccacgttctaacacctgctacctttttgatccttttggattctcggatgatcgtctcaaacagatttaccagtttgaatatgagggtctcctgcgccgcagcgctcttgctaccaaggaccgctgtattacgctggaaaaatctacccagaccgtgcagggtccccgttctgccgcctgcggacttttctgctgcatgttccttcacgcctttgtgcactggcctgaccgtcccatggacggaaaccccaccatgaaattgctaactggagtgccaaacaacatgcttcattctcctaaagtccagcccaccctgtgtgacaatcaaaaagcactctaccattttcttaatacccattcgccttattttcgctcccatcgtacacacatcgaaagggccactgcgttcgaccgtatggatgttcaataatgactcatgtaaacaacgtgttcaataaacatcactttatttttttacatgtatcaaggctctgcattacttatttatttacaagtcgaatgggttctgacgagaatcagaatgacccgcaggcagtgatacgttgcggaactgatacttgggttgccacttgaattcgggaatcaccaacttgggaaccggtatatcgggcaggatgtcactccacagctttctggtcagctgcaaagctccaagcaggtcaggagccgaaatcttgaaatcacaattaggaccagtgctttgagcgcgagagttgcggtacaccggattgcagcactgaaacaccatcagcgacggatgtctcacgcttgccagcacggtgggatctgcaatcatgcccacatccagatcttcagcattggcaatgctgaacggggtcatcttgcaggtctgcctacccatggcgggcacccaattaggcttgtggttgcaatcgcagtgcagggggatcagtatcatcttggcctgatcctgtctgattcctggatacacggctctcatgaaagcatcatattgcttgaaagcctgctgggctttactaccctcggtataaaacatcccgcaggacctgctcgaaaactggttagctgcacagccggcatcattcacacagcagcgggcgtcattgttagctatttgcaccacacttctgccccagcggttttgggtgattttggttcgctcgggattctcctttaaggctcgttgtccgttctcgctggccacatccatctcgataatctgctccttctgaatcataatattgccatgcaggcacttcagcttgccctcataatcattgcagccatgaggccacaacgcacagcctgtacattcccaattatggtgggcgatctgagaaaaagaatgtatcattccctgcagaaatcttcccatcatcgtgctcagtgtcttgtgactagtgaaagttaactggatgcctcggtgctcctcgtttacgtactggtgacagatgcgcttgtattgttcgtgttgctcaggcattagtttaaaagaggttctaagttcgttatccagcctgtacttctccatcagcagacacatcacttccatgcctttctcccaagcagacaccaggggcaagctaatcggattcttaacagtgcaggcagcagctcctttagccagagggtcatctttagcgatcttctcaatgcttcttttgccatccttctcaacgatgcgcacgggcgggtagctgaaacccactgctacaagttgcgcctcttctctttcttcttcgctgtcttgactgatgtcttgcatggggatatgtttggtcttccttggcttctttttggggggtatcggaggaggaggactgtcgctccgttccggagacagggaggattgtgacgtttcgctcaccattaccaactgactgtcggtagaagaacctgaccccacacggcgacaggtgtttctcttcgggggcagaggtggaggcgattgcgaagggctgcggtccgacctggaaggcggatgactggcagaaccccttccgcgttcgggggtgtgctccctgtggcggtcgcttaactgatttccttcgcggctggccattgtgttctcctaggcagagaaacaacagacatggaaactcagccattgctgtcaacatcgccacgagtgccatcacatctcgtcctcagcgacgaggaaaaggagcagagcttaagcattccaccgcccagtcctgccaccacctctaccctagaagataaggaggtcgacgcatctcatgacatgcagaataaaaaagcgaaagagtctgagacagacatcgagcaagacccgggctatgtgacaccggtggaacacgaggaagagttgaaacgctttctagagagagaggatgaaaactgcccaaaacaacgagcagataactatcaccaagatgctggaaatagggatcagaacaccgactacctcatagggcttgacggggaagacgcgctccttaaacatctagcaagacagtcgctcatagtcaaggatgcattattggacagaactgaagtgcccatcagtgtggaagagctcagccgcgcctacgagcttaacctcttttcacctcgtactccccccaaacgtcagccaaacggcacctgcgagccaaatcctcgcttaaacttttatccagcttttgctgtgccagaagtactggctacctatcacatcttttttaaaaatcaaaaaattccagtctcctgccgcgctaatcgcacccgcgccgatgccctactcaatctgggacctggttcacgcttacctgatatagcttccttggaagaggttccaaagatcttcgagggtctgggcaataatgagactcgggccgcaaatgctctgcaaaagggagaaaatggcatggatgagcatcacagcgttctggtggaattggaaggcgataatgccagactcgcagtactcaagcgaagcatcgaggtcacacacttcgcatatcccgctgtcaacctgccccctaaagtcatgacggcggtcatggaccagttactcattaagcgcgcaagtcccctttcagaagacatgcatgacccagatgcctgtgatgagggtaaaccagtggtcagtgatgagcagctaacccgatggctgggcaccgactctcccagggatttggaagagcgtcgcaagcttatgatggccgtggtgctggttaccgtagaactagagtgtctccgacgtttctttaccgattcagaaaccttgcgcaaactcgaagagaatctgcactacacttttagacacggctttgtgcggcaggcatgcaagatatctaacgtggaactcaccaacctggtttcctacatgggtattctgcatgagaatcgcctaggacaaagcgtgctgcacagcaccctgaagggggaagcccgccgtgattacatccgcgattgtgtctatctgtacctgtgccacacgtggcaaaccggcatgggtgtatggcagcaatgtttagaagaacagaacttgaaagagcttgacaagctcttacagaaatctcttaaggttctgtggacagggttcgacgagcgcaccgtcgcttccgacctggcagacctcatcttcccagagcgtctcagggttactttgcgaaacggattgcctgactttatgagccagagcatgcttaacaattttcgctctttcatcctggaacgctccggtatcctgcccgccacctgctgcgcactgccctccgactttgtgcctctcacctaccgcgagtgccccccgccgctatggagtcactgctacctgttccgtctggccaactatctctcctaccactcggatgtgatcgaggatgtgagcggagacggcttgctggagtgtcactgccgctgcaatctgtgcacgccccaccggtccctagcttgcaacccccagttgatgagcgaaacccagataataggcacctttgaattgcaaggccccagcagccaaggcgatgggtcttctcctgggcaaagtttaaaactgaccccgggactgtggacctccgcctacttgcgcaagtttgctccggaagattaccacccctatgaaatcaagttctatgaggaccaatcacagcctccaaaggccgaactttcggcctgcgtcatcacccagggggcaattctggcccaattgcaagccatccaaaaatcccgccaagaatttctactgaaaaagggtaagggggtctaccttgacccccagaccggcgaggaactcaacacaaggttccctcaggatgtcccaacgacgagaaaacaagaagttgaaggtgcagccgccgcccccagaagatatggaggaagattgggacagtcaggcagaggaggcggaggaggacagtctggaggacagtctggaggaagacagtttggaggaggaaaacgaggaggcagaggaggtggaagaagtaaccgccgacaaacagttatcctcggctgcggagacaagcaacagcgctaccatctccgctccgagtcgaggaacccggcggcgtcccagcagtagatgggacgagaccggacgcttcccgaacccaaccagcgcttccaagaccggtaagaaggatcggcagggatacaagtcctggcgggggcataagaatgccatcatctcctgcttgcatgagtgcgggggcaacatatccttcacgcggcgctacttgctattccaccatggggtgaactttccgcgcaatgttttgcattactaccgtcacctccacagcccctactatagccagcaaatcccggcagtctcgacagataaagacagcggcggcgacctccaacagaaaaccagcagcggcagttagaaaatacacaacaagtgcagcaacaggaggattaaagattacagccaacgagccagcgcaaacccgagagttaagaaatcggatctttccaaccctgtatgccatcttccagcagagtcggggtcaagagcaggaactgaaaataaaaaaccgatctctgcgttcgctcaccagaagttgtttgtatcacaagagcgaagatcaacttcagcgcactctcgaggacgccgaggctctcttcaacaagtactgcgcgctgactcttaaagagtaggcagcgaccgcgcttattcaaaaaaggcgggaattacatcatcctcgacatgagtaaagaaattcccacgccttacatgtggagttatcaaccccaaatgggattggcggcaggcgcctcccaggactactccacccgcatgaattggctcagcgccgggccttctatgatttctcgagttaatgatatacgcgcctaccgaaaccaaatacttttggaacagtcagctcttaccaccacgccccgccaacaccttaatcccagaaattggcccgccgccctagtgtaccaggaaagtcccgctcccaccactgtattacttcctcgagacgcccaggccgaagtccaaatgactaatgcaggtgcgcagttagctggcggctccaccctatgtcgtcacaggcctcggcataatataaaacgcctgatgatcagaggccgaggtatccagctcaacgacgagtcggtgagctctccgcttggtctacgaccagacggaatctttcagattgccggctgcgggagatcttccttcacccctcgtcaggctgttctgactttggaaagttcgtcttcgcaaccccgctcgggcggaatcgggaccgttcaatttgtggaggagtttactccctctgtctacttcaaccccttctccggatctcctgggcattacccggacgagttcataccgaacttcgacgcgattagcgagtcagtggacggctacgattgatgtctggtgacgcggctgagctatctcggctgcgacatctagaccactgccgccgctttcgctgctttgcccgggaactcattgagttcatctacttcgaactccccaaggatcaccctcaaggtccggcccacggagtgcggatttctatcgaaggcaaaatagactctcgcctgcaacgaattttctcccagcggcccgtgctgatcgagcgagaccagggaaacaccacggtttccatctactgcatttgtaatcaccccggattgcatgaaagcctttgctgtcttatgtgtactgagtttaataaaaactgaattaagactctcctacggactgccgcttcttcaacccggattttacaaccagaagaacgaaacttttcctgtcgtccaggactctgttaacttcacctttcctactcacaaactagaagctcaacgactacaccgcttttccagaagcattttccctactaatactactttcaaaaccggaggtgagctccaaggtcttcctacagaaaacccttgggtggaagcgggccttgtagtgctaggaattcttgcgggtgggcttgtgattattctttgctacctatacacaccttgcttcactttcttagtggtgttgtggtattggtttaaaaaatggggcccatactagtcttgcttgttttactttcgcttttggaaccgggttctgccaattacgatccatgtctagacttcgacccagaaaactgcacacttacttttgcacccgacacaagccgcatctgtggagttcatcgcctctcttacgaacttggcccccaacgacaaaaatttacctgcatggtgggaatcaaccccatagttatcacccagcaaagtggagatactaagggttgcattcactgctcctgcgattccatcgagtgcacctacaccctgctgaagaccctatgcggcctaagagacctgctaccaatgaattaaaaaatgattaataaaaaatcacttacttgaaatcagcaataaggtctctgttgaaattttctcccagcagcacctcacttccctcttcccaactctggtattctaaaccccgttcagcggcatactttctccatactttaaaggggatgtcaaattttagctcctctcctgtacccacaatcttcatgtctttcttcccagatgaccaagagagtccggctcagtgactccttcaaccctgtctacccctatgaagatgaaagcacctcccaacacccctttataaacccagggtttatttccccaaatggcttcacacaaagcccaaacggagttcttactttaaaatgtttaaccccactaacaaccacaggcggatctctacagctaaaagtgggagggggacttacagtggatgacaccaacggttttttgaaagaaaacataagtgccaccacaccactcgttaagactggtcactctataggtttaccactaggagccggattgggaacgaatgaaaataaactttgtatcaaattaggacaaggacttacattcaattcaaacaacatttgcattgatgacaatattaacaccttatggacaggagtcaaccccaccgaagccaactgtcaaatcatgaactccagtgaatctaatgattgcaaattaattctaacactagttaaaactggagcactagtcactgcatttgtttatgttataggagtatctaacaattttaatatgctaactacacacagaaatataaattttactgcagagctgtttttcgattctactggtaatttactaactagactctcatccctcaaaactccacttaatcataaatcaggacaaaacatggctactggtgccattactaatgctaaaggtttcatgcccagcacgactgcctatcctttcaatgataattctagagaaaaagaaaactacatttacggaacttgttactacacagctagtgatcgcactgcttttcccattgacatatctgtcatgcttaaccgaagagcaataaatgacgagacatcatattgtattcgtataacttggtcctggaacacaggagatgccccagaggtgcaaacctctgctacaaccctagtcacctccccatttaccttttactacatcagagaagacgactgacaaataaagtttgcgatcgccaggcccaccatgccactcctcctgctcctccctctcctttgggccggcgctctcgccaattgggtcaacgtgatcagcgacctcaagaaaatcgaggacctcatccagtccatgcacatcgacgccacactgtacaccgagagcgacgtgcatcctagctgtaaggtcaccgctatgaaatgtttcctgctcgaacttcaggtcatctccctggaaagcggcgacgccagcatccacgacaccgtggagaacctcattatcctggccaataatagcctttccagcaacggcaacgtcaccgagtccggctgtaaggagtgcgaagagctcgaagagaagaacatcaaggagttcctgcaaagcttcgtccacatcgtgcagatgtttattaatacctccggctccggcgaagggcggggcagcctcctgacctgtggagatgtggaagaaaaccccggcccagctttaacattcgccttgctggtcgccctgctcgtcctgtcctgtaaatccagttgttccgtgggttgcgacctcccacagacacattccctcggctctagacgcacattaatgctgctcgcccaaatgagacggatttccctgttttcatgtctgaaagataggcacgatttcggcttccctcaagaagaattcggaaatcaatttcagaaagccgagacaattcccgtgcttcacgaaatgattcaacaaatttttaacctgttctccaccaaagatagctccgccgcctgggacgaaacactgctcgataagttttataccgagctttatcaacagctcaacgatctcgaggcttgcgtcattcaaggcgtcggcgttaccgaaaccccactcatgaaagaagattctatcctcgccgtccggaagtattttcagcgcattaccctgtacctcaaggaaaaaaagtattccccctgcgcttgggaagtcgttcgcgctgagattatgaggtccttctcactctctaccaatctccaggagagccttcggtccaaagagggcagtggccaatgcaccaactacgccctgcttaagctggccggcgacgtcgaaagtaatcccggcccaaaaaagagcggcgtgctctttctgctcggaattatcctcctggtgctcatcggcgtccagggcacacccgtcgtccggaaaggcagatgcagctgtatttccactaatcagggcaccattcatctgcagagcttaaaggatctgaagcagttcgctccctccccctcttgtgaaaagatcgagattatcgccaccctcaaaaacggcgtgcagacctgcctgaatcctgacagcgccgacgtcaaagagctcatcaagaaatgggaaaagcaagtgtcccagaaaaagaaacagaaaaacggaaagaagcaccagaagaaaaaggtcctcaaggtccggaagtcccagcggtccagacagaagaaaaccaccggcagtggcgtcaagcaaacccttaacttcgatctgctgaaactggccggcgatgtcgaatctaatcccggccccatgtgccatcaacaacttgtgatttcctggttcagcctcgtgttcctcgcctcccctctggtcgctatctgggagctcaaaaaggacgtctacgtggtcgagcttgactggtaccccgacgctccaggcgagatggtcgtgctgacatgcgatacacccgaggaggacggcattacatggacactggatcaatccagcgaagtgctgggatccggaaagacactcacaattcaggtgaaggaattcggcgacgccggacaatatacatgccataagggcggagaagtgctgtcccactccctgctcctcttacataagaaagaggacggcatctggtctaccgacatcctcaaagatcaaaaggagccaaagaacaaaacattcctgcgctgtgaagctaaaaactactccggcagatttacatgttggtggctcaccaccattagcaccgacctcacctttagcgtgaagagttcccggggatccagcgatcctcagggcgtcacctgtggcgccgcaaccctgtccgccgaacgggtgcggggcgataataaagaatacgaatattccgtcgaatgtcaagaagatagcgcttgtcccgccgcagaagaaagcctccctatcgaagtgatggtcgacgctgtgcataaactgaaatacgagaattatacaagttcctttttcattcgggatattatcaagcccgatcccccaaaaaatctccaactcaaacccctcaaaaactccagacaagtcgaagtgtcctgggaatatcccgatacatggagcaccccccactcttattttagcctcaccttttgtgtgcaagtgcaaggaaaatccaaacgcgagaaaaaggaccgcgtgtttaccgataaaacatccgctaccgtgatttgtcggaagaacgcttccatcagtgtccgcgctcaagatcggtattactcctcctcctggagtgagtgggcctccgtcccatgtagcggcggaggtgggagtggcggcgggggttccggagggggtggctcccgcaatctgcctgtcgctacccccgatcccggcatgtttccctgtctgcatcatagccagaatctcctcagagctgtgagtaatatgctgcaaaaagctcgccagaccctggagttctatccctgtacctccgaggaaatcgaccacgaggacattaccaaggacaagacatctaccgtcgaagcttgcctgccccttgagctgacaaaaaacgaaagctgtctgaactctcgcgaaacatcctttatcaccaacggaagctgtctcgcttctcggaaaacatccttcatgatggctctctgtctgagcagcatctacgaggatcttaaaatgtatcaagtcgaatttaagacaatgaacgccaaactcctgatggacccaaaacggcaaattttcctggaccagaatatgctcgccgtgatcgacgaactcatgcaagctctcaactttaatagcgaaaccgtcccccagaagtcttctctcgaggagcccgacttctacaagaccaagattaaactgtgtatcctgctccacgcctttcggatccgcgccgtcaccatcgacagggtcatgtcctacctgaacgcctcttaagctagcttgactgactgagatacagcgtaccttcagctcacagacatgataagatacattgatgagtttggacaaaccacaactagaatgcagtgaaaaaaatgctttatttgtgaaatttgtgatgctattgctttatttgtaaccattataagctgcaataaacaagttaacaacaacaattgcattcattttatgtttcaggttcagggggaggtgtgggaggttttttaaagcaagtaaaacctctacaaatgtggtagtcgtcagctatcctgcaggaacttgtttatttgaaaatcaattcacaaaatccgagtagttattttgcctcccccttcccatttaacagaatacaccaatctctccccacgcacagctttaaacatttggataccattagatatagacatggttttagattccacattccaaacagtttcagagcgagccaatctggggtcagtgatagataaaaatccatcgggatagtcttttaaagcgctttcacagtccaactgctgcggatgcgactccggagtctggatcacggtcatctggaagaagaacgatgggaatcataatccgaaaacggtatcggacgattgtgtctcatcaaacccacaagcagccgctgtctgcgtcgctccgtgcgactgctgtttatgggatcagggtccacagtgtcctgaagcatgattttaatagcccttaacatcaactttctggtgcgatgcgcgcagcaacgcattctgatttcactcaaatctttgcagtaggtacaacacattattacaatattgtttaataaaccataattaaaagcgctccagccaaaactcatatctgatataatcgcccctgcatgaccatcataccaaagtttaatataaattaaatgacgttccctcaaaaacacactacccacatacatgatctcttttggcatgtgcatattaacaatctgtctgtaccatggacaacgttggttaatcatgcaacccaatataaccttccggaaccacactgccaacaccgctcccccagccatgcattgaagtgaaccctgctgattacaatgacaatgaagaacccaattctctcgaccgtgaatcacttgagaatgaaaaatatctatagtggcacaacatagacataaatgcatgcatcttctcataatttttaactcctcaggatttagaaacatatcccagggaataggaagctcttgcagaacagtaaagctggcagaacaaggaagaccacgaacacaacttacactatgcatagtcatagtatcacaatctggcaacagcgggtggtcttcagtcatagaagctcgggtttcattttcctcacaacgtggtaactgggctctggtgtaagggtgatgtctggcgcatgatgtcgagcgtgcgcgcaaccttgtcataatggagttgcttcctgacattctcgtattttgtatagcaaaacgcggccctggcagaacacactcttcttcgccttctatcctgccgcttagcgtgttccgtgtgatagttcaagtacaaccacactcttaagttggtcaaaagaatgctggcttcagttgtaatcaaaactccatcgcatctaatcgttctgaggaaatcatccaagcaatgcaactggattgtgtttcaagcaggagaggagagggaagagacggaagaaccatgttaatttttattccaaacgatctcgcagtacttcaaattgtagatcgcgcagatggcatctctcgcccccactgtgttggtgaaaaagcacagctagatcaaaagaaatgcgattttcaaggtgctcaacggtggcttccagcaaagcctccacgcgcacatccaagaacaaaagaataccaaaagaaggagcattttctaactcctcaatcatcatattacattcctgcaccattcccagataattttcagctttccagccttgaattattcgtgtcagttcttgtggtaaatccaatccacacattacaaacaggtcccggagggcgccctccaccaccattcttaaacacaccctcataatgacaaaatatcttgctcctgtgtcacctgtagcgaattgagaatggcaacatcaattgacatgcccttggctctaagttcttctttaagttctagttgtaaaaactctctcatattatcaccaaactgcttagccagaagccccccgggaacaagagcaggggacgctacagtgcagtacaagcgcagacctccccaattggctccagcaaaaacaagattggaataagcatattgggaaccgccagtaatatcatcgaagttgctggaaatataatcaggcagagtttcttgtaaaaattgaataaaagaaaaatttgccaaaaaaacattcaaaacctctgggatgcaaatgcaataggttaccgcgctgcgctccaacattgttagttttgaattagtctgcaaaaataaaaaaaaaaacaagcgtcatatcatagtagcctgacgaacagatggataaatcagtctttccatcacaagacaagccacagggtctccagctcgaccctcgtaaaacctgtcatcatgattaaacaacagcaccgaaagttcctcgcggtgaccagcatgaataattcttgatgaagcatacaatccagacatgttagcatcagttaacgagaaaaaacagccaacatagcctttgggtataattatgcttaatcgtaagtatagcaaagccacccctcgcggatacaaagtaaaaggcacaggagaataaaaaatataattatttctctgctgctgttcaggcaacgtcgcccccggtccctctaaatacacatacaaagcctcatcagccatggcttaccagacaaagtacagcgggcacacaaagcacaagctctaaagtgactctccaacctctccacaatatatatatacacaagccctaaactgacgtaatgggagtaaagtgtaaaaaatcccgccaaacccaacacacaccccgaaactgcgtcaccagggaaaagtacagtttcacttccgcaatcccaacaggcgtaacttcctctttctcacggtacgtgatatcccactaacttgcaacgtcattttcccacggtcgcaccgccccttttagccgttaaccccacagccaatcaccacacgatccacactttttaaaatcacctcatttacatattggcaccattccatctataaggtatattatatagataga

SEQ ID NO: 218 - DNA, 35779 bp, Artificial Sequence
  Genome sequence of NG-784 virus
tctatctatataatataccttatagatggaatggtgccaatatgtaaatgaggtgattttaaaaagtgtggatcgtgtggtgattggctgtggggttaacggctaaaaggggcggtgcgaccgtgggaaaatgacgttttgtgggggtggagtttttttgcaagttgtcgcgggaaatgtgacgcataaaaaggcttttttctcacggaactacttagttttcccacggtatttaacaggaaatgaggtagttttgaccggatgcaagtgaaaattgttgattttcgcgcgaaaactgaatgaggaagtgtttttctgaataatgtggtatttatggcagggtggagtatttgttcagggccaggtagactttgacccattacgtggaggtttcgattaccgtgttttttacctgaatttccgcgtaccgtgtcaaagtcttctgtttttacgtaggtgtcagctgatcgctagggtatttatacctcagggtttgtgtcaagaggccactcttgagtgccagcgagaagagttttctcctctgcgccggcagtttaataataaaaaaatgagagatttgcgatttctgcctcaggaaataatctctgctgagactggaaatgaaatattggagcttgtggtgcacgccctgatgggagacgatccggagccacctgtgcagctttttgagcctcctacgcttcaggaactgtatgatttagaggtagagggatcggaggattctaatgaggaagctgtaaatggcttttttaccgattctatgcttttagctgctaatgaagggttagaattagatccgcctttggacacttttgatactccaggggtaattgtggaaagcggtacaggtgtaagaaaattacctgatttgagttccgtggactgtgatttgcactgctatgaagacgggtttcctccgagtgatgaggaggaccatgaaaaggagcagtccatgcagactgcagcgggtgagggagtgaaggctgccaatgttggttttcagttggattgcccggagcttcctggacatggctgtaagtcttgtgaatttcacaggaaaaatactggagtaaaggaactgttatgttcgctttgttatatgagaacgcactgccactttatttacagtaagtgtgtttaagttaaaatttaaaggaatatgctgtttttcacatgtatattgagtgtgagttttgtgcttcttattataggtcctgtgtctgatgctgatgaatcaccatctcctgattctactacctcacctcctgagattcaagcacctgttcctgtggacgtgcgcaagcccattcctgtgaagcttaagcctgggaaacgtccagcagtggaaaaacttgaggacttgttacagggtggggacggacctttggacttgagtacacggaaacgtccaagacaataagtgttccatatccgtgtttacttaaggtgacgtcaatatttgtgtgacagtgcaatgtaataaaaatatgttaactgttcactggtttttattgctttttgggcggggactcaggtatataagtagaagcagacctgtgtggttagctcataggagctggctttcatccatggaggtttgggccattttggaagaccttaggaagactaggcaactgttagagaacgcttcggacggagtctccggtttttggagattctggttcgctagtgaattagctagggtagtttttaggataaaacaggactataaacaagaatttgaaaagttgttggtagattgcccaggactttttgaagctcttaatttgggccatcaggttcactttaaagaaaaagttttatcagttttagacttttcaaccccaggtagaactgctgctgctgtggcttttcttacttttatattagataaatggatcccgcagactcatttcagcaggggatacgttttggatttcatagccacagcattgtggagaacatggaaggttcgcaagatgaggacaatcttaggttactggccagtgcagcctttgggtgtagcgggaatcctgaggcatccaccggtcatgccagcggttctggaggaggaacagcaagaggacaacccgagagccggcctggaccctccagtggaggaggcggagtagctgacttgtctcctgaactgcaacgggtgcttactggatctacgtccactggacgggataggggcgttaagagggagagggcatctagtggtactgatgctagatctgagttggctttaagtttaatgagtcgcagacgtcctgaaaccatttggtggcatgaggttcagaaagagggaagggatgaagtttctgtattgcaggagaaatattcactggaacaggtgaaaacatgttggttggagcctgaggatgattgggaggtggccattaaaaattatgccaagatagctttgaggcctgataaacagtataagattactagacggattaatatccggaatgcttgttacatatctggaaatggggctgaggtggtaatagatactcaagacaaggcagttattagatgctgcatgatggatatgtggcctggggtagtcggtatggaagcagtaacttttgtaaatgttaagtttaggggagatggttataatggaatagtgtttatggccaataccaaacttatattgcatggttgtagcttttttggtttcaacaatacctgtgtagatgcctggggacaggttagtgtacggggatgtagtttctatgcgtgttggattgccacagctggcagaaccaagagtcaattgtctctgaagaaatgcatatttcaaagatgtaacctgggcattctgaatgaaggcgaagcaagggtccgccactgcgcttctacagatactggatgttttattttgattaagggaaatgccagcgtaaagcataacatgatttgcggtgcttccgatgagaggccttatcaaatgctcacttgtgctggtgggcattgtaatatgctggctactgtgcatattgtttcccatcaacgcaaaaaatggcctgtttttgatcacaatgtgatgacgaagtgtaccatgcatgcaggtgggcgtagaggaatgtttatgccttaccagtgtaacatgaatcatgtgaaagtgttgttggaaccagatgccttttccagaatgagcctaacaggaatttttgacatgaacatgcaaatctggaagatcctgaggtatgatgatacgagatcgagggtacgcgcatgcgaatgcggaggcaagcatgccaggttccagccggtgtgtgtagatgtgactgaagatctcagaccggatcatttggttattgcccgcactggagcagagttcggatccagtggagaagaaactgactaaggtgagtattgggaaaactttggggtgggattttcagatggacagattgagtaaaaatttgttttttctgtcttgcagctgtcatgagtggaaacgcttcttttaaggggggagtcttcagcccttatctgacagggcgtctcccatcctgggcaggagttcgtcagaatgttatgggatctactgtggatggaagacccgtccaacccgccaattcttcaacgctgacctatgctactttaagttcttcacctttggacgcagctgcagctgccgccgccgcttctgttgccgctaacactgtgcttggaatgggttactatggaagcatcatggctaattccacttcctctaataacccttctaccctgactcaggacaagttacttgtccttttggcccagctggaggctttgacccaacgtctgggtgaactttctcagcaggtggtcgagttgcgagtacaaactgagtctgctgtcggcacggcaaagtctaaataaaaaaatcccagaatcaatgaataaataaacaagcttgttgttgatttaaaatcaagtgtttttatttcatttttcgcgcacggtatgccctagaccaccgatctctatcattgagaactcggtggattttttccaggatcctatagaggtgggattgaatgtttagatacatgggcattaggccgtctttggggtggagatagctccattgaagggattcatgctccggggtagtgttgtaaatcacccagtcataacaaggtcgcagtgcatggtgttgcacaatatcttttagaagtaggctgattgccacagataagcccttggtgtaggtgtttacaaaccggttgagctgggatgggtgcattcggggtgaaattatgtgcattttggattggatttttaagttggcaatattgccgccaagatcccgtcttgggttcatgttatgaaggaccaccaagacggtgtatccggtacatttaggaaatttatcgtgcagcttggatggaaaagcgtggaaaaatttggagacacccttgtgtcctccaagattttccatgcactcatccatgataatagcaatggggccgtgggcagcggcgcgggcaaacacgttccgtgggtctgacacatcatagttatgttcctgagttaaatcatcataagccattttaatgaatttggggcggagagtaccagattggggtatgaatgttccttcgggccccggagcatagttcccctcacagatttgcatttcccaagctttcagttccgagggtggaatcatgtccacctggggggctatgaaaaacaccgtttctggggcgggggtgattaattgtgatgatagcaaatttctgagcaattgagatttgccacatccggtggggccataaatgattccgattacgggttgcaggtggtagtttagggaacggcaactgccgtcttctcgaagcaagggggccacctcgttcatcatttcccttacatgcatattttcccgcaccaaatccattaggaggcgctctcctcctagtgatagaagttcttgtagtgaggaaaagtttttcagcggtttcagaccgtcagccatgggcattttggagagagtttgctgcaaaagttctagtctgttccacagttcagtgatgtgttctatggcatctcgatccagcagacctcctcgtttcgcgggtttggacggctcctggaatagggtatgagacgatgggcgtccagcgctgccagggttcggtccttccagggtctcagtgttcgagtcagggttgtttccgtcacagtgaaggggtgtgcgcctgcttgggcgcttgccagggtgcgcttcagactcatcctgctggtcgaaaacttctgtcgcttggcgccctgtatgtcggccaagtagcagtttaccatgagttcgtagttgagcgcctcggctgcgtggcctttggcgcggagcttacctttggaagttttcttgcataccgggcagtataggcatttcagcgcatacaacttgggcgcaaggaaaacggattctggggagtatgcatctgcgccgcaggaggcgcaaacagtttcacattccaccagccaggttaaatccggttcattggggtcaaaaacaagttttccgccatattttttgatgcgtttcttacctttggtctccatgagttcgtgtcctcgttgagtgacaaacaggctgtccgtgtccccgtagactgattttacaggcctcttctccagtggagtgcctcggtcttcttcgtacaggaactctgaccactctgatacaaaggcgcgcgtccaggccagcacaaaggaggctatgtgggaggggtagcgatcgttgtcaaccagggggtccaccttttccaaagtatgcaaacacatgtcaccctcttcaacatccaggaatgtgattggcttgtaggtgtatttcacgtgacctggggtccccgctgggggggtataaaagggggcggttctttgctcttcctcactgtcttccggatcgctgtccaggaacgtcagctgttggggtaggtattccctctcgaaggcgggcatgacctctgcactcaggttgtcagtttctaagaacgaggaggatttgatattgacagtgccggttgagatgcctttcatgaggttttcgtccatctggtcagaaaacacaatttttttattgtcaagtttggtggcaaatgatccatacagggcgttggataaaagtttggcaatggatcgcatggtttggttcttttccttgtccgcgcgctctttggcggcgatgttgagttggacatactcgcgtgccaggcacttccattcggggaagatagttgttaattcatctggcacgattctcacttgccaccctcgattatgcaaggtaattaaatccacactggtggccacctcgcctcgaaggggttcattggtccaacagagcctacctcctttcctagaacagaaagggggaagtgggtctagcataagttcatcgggagggtctgcatccatggtaaagattcccggaagtaaatccttatcaaaatagctgatgggagtggggtcatctaaggccatttgccattctcgagctgccagtgcgcgctcatatgggttaaggggactgccccatggcatgggatgggtgagtgcagaggcatacatgccacagatgtcatagacgtagatgggatcctcaaagatgcctatgtaggttggatagcatcgcccccctctgatacttgctcgcacatagtcatatagttcatgtgatggcgctagcagccccggacccaagttggtgcgattgggtttttctgttctgtagacgatctggcgaaagatggcgtgagaattggaagagatggtgggtctttgaaaaatgttgaaatgggcatgaggtagacctacagagtctctgacaaagtgggcataagattcttgaagcttggttaccagttcggcggtgacaagtacgtctagggcgcagtagtcaagtgtttcttgaatgatgtcataacctggttggtttttcttttcccacagttcgcggttgagaaggtattcttcgcgatccttccagtactcttctagcggaaacccgtctttgtctgcacggtaagatcctagcatgtagaactgattaactgccttgtaagggcagcagcccttctctacgggtagagagtatgcttgagcagcttttcgtagcgaagcgtgagtaagggcaaaggtgtctctgaccatgactttgaggaattggtatttgaagtcgatgtcgtcacaggctccctgttcccagagttggaagtctacccgtttcttgtaggcggggttgggcaaagcgaaagtaacatcattgaagagaatcttgccggccctgggcatgaaattgcgagtgatgcgaaaaggctgtggtacttccgctcggttattgataacctgggcagctaggacgatctcgtcgaaaccgttgatgttgtgtcctacgatgtataattctatgaaacgcggcgtgcctctgacgtgaggtagcttactgagctcatcaaaggttaggtctgtggggtcagataaggcgtagtgttcgagagcccattcgtgcaggtgaggattcgctttaaggaaggaggaccagaggtccactgccagtgctgtttgtaactggtcccggtactgacgaaaatgccgtccgactgccattttttctggggtgacgcaatagaaggtttgggggtcctgccgccagcgatcccacttgagttttatggcgaggtcataggcgatgttgacgagccgctggtctccagagagtttcatgaccagcatgaaggggattagctgcttgccaaaggaccccatccaggtgtaggtttccacatcgtaggtgagaaagagcctttctgtgcgaggatgagagccaatcgggaagaactggatctcctgccaccagttggaggaatggctgttgatgtgatggaagtagaactccctgcgacgcgccgagcattcatgcttgtgcttgtacagacggccgcagtagtcgcagcgttgcacgggttgtatctcgtgaatgagttgtacctggcttcccttgacgagaaatttcagtgggaagccgaggcctggcgattgtatctcgtgctttactatgttgtctgcatcggcctgttcatcttctgtctcgatggtggtcatgctgacgagccctcgcgggaggcaagtccagacctcggcgcggcaggggcggagctcgaggacgagagcgcgcaggctggagctgtccagggtcctgagacgctgcggactcaggttagtaggcagtgtcaggagattaacttgcatgatcttttggagggcgtgcgggaggttcagatagtacttgatctcaacgggtccgttggtggagatgtcgatggcttgcagggttccgtgtcccttgggcgctaccaccgtgcccttgtttttcattttggacggcggtggctctgttgcttcttgcatgtttagaagcggtgtcgagggcgcgcaccgggcggcaggggcggctcgggacccggcggcatggctggcagtggtacgtcggcgccgcgcgcgggtaggttctggtactgcgccctgagaagactcgcatgcgcgacgacgcggcggttgacatcctggatctgacgcctctgggtgaaagctaccggccccgtgagcttgaacctgaaagagagttcaacagaatcaatctcggtatcgttgacggcggcttgcctaaggatttcttgcacgtcaccagagttgtcctggtaggcgatctccgccatgaactgctcgatctcttcctcttgaagatctccgcggcccgctctctcgacggtggccgcgaggtcgttggagatgcgcccaatgagttgagagaatgcattcatgcccgcctcgttccagacgcggctgtagaccacggcccccacgggatctctcgcgcgcatgaccacctgggcgaggttgagctccacgtggcgggtgaagaccgcatagttgcataggcgctggaaaaggtagttgagtgtggtggcgatgtgctcggtgacgaagaaatacatgatccatcgtctcagcggcatctcgctgacatcgcccagagcttccaagcgctccatggcctcgtagaagtccacggcaaaattaaaaaactgggagtttcgcgcggacacggtcaactcctcttccagaagacggataagttcggcgatggtggtgcgcacctcgcgctcgaaagcccctgggatttcttcctcaatctcttcttcttccactaacatctcttcctcttcaggtggggctgcaggaggagggggaacgcggcgacgccggcggcgcacgggcagacggtcgatgaatctttcaatgacctctccgcggcggcggcgcatggtttcagtgacggcgcggccgttctcgcgcggtcgcagagtaaaaacaccgccgcgcatctccttaaagtggtgactgggaggttctccgtttgggagggagagggcgctgattatacattttattaattggcccgtagggactgcacgcagagatctgatcgtgtcaagatccacgggatctgaaaacctttcgacgaaagcgtctaaccagtcacagtcacaaggtaggctgagtacggcttcttgtgggcgggggtggttatgtgttcggtctgggtcttctgtttcttcttcatctcgggaaggtgagacgatgctgctggtgatgaaattaaagtaggcagttctaagacggcggatggtggcgaggagcaccaggtctttgggtccggcttgctggatacgcaggcgattggccattccccaagcattatcctgacatctagcaagatctttgtagtagtcttgcatgagccgttctacgggcacttcttcctcacccgttctgccatgcatacgtgtgagtccaaatccgcgcattggttgtaccagtgccaagtcagctacgactctttcggcgaggatggcttgctgtacttgggtaagggtggcttgaaagtcatcaaaatccacaaagcggtggtaagctcctgtattaatggtgtaagcacagttggccatgactgaccagttaactgtctggtgaccagggcgcacgagctcggtgtatttaaggcgcgaataggcgcgggtgtcaaagatgtaatcgttgcaggtgcgcaccagatactggtaccctataagaaaatgcggcggtggttggcggtagagaggccatcgttctgtagctggagcgccaggggcgaggtcttccaacataaggcggtgatagccgtagatgtacctggacatccaggtgattcctgcggcggtagtagaagcccgaggaaactcgcgtacgcggttccaaatgttgcgtagcggcatgaagtagttcattgtaggcacggtttgaccagtgaggcgcgcgcagtcattgatgctctatagacacggagaaaatgaaagcgttcagcgactcgactccgtagcctggaggaacgtgaacgggttgggtcgcggtgtaccccggttcgagacttgtactcgagccggccggagccgcggctaacgtggtattggcactcccgtctcgacccagcctacaaaaatccaggatacggaatcgagtcgttttgctggtttccgaatggcagggaagtgagtcctattttttttttttgccgctcagatgcatcccgtgctgcgacagatgcgcccccaacaacagcccccctcgcagcagcagcagcagcaatcacaaaaggctgtccctgcaactactgcaactgccgccgtgagcggtgcgggacagcccgcctatgatctggacttggaagagggcgaaggactggcacgtctaggtgcgccttcacccgagcggcatccgcgagttcaactgaaaaaagattctcgcgaggcgtatgtgccccaacagaacctatttagagacagaagcggcgaggagccggaggagatgcgagcttcccgctttaacgcgggtcgtgagctgcgtcacggtttggaccgaagacgagtgttgcgggacgaggatttcgaagttgatgaaatgacagggatcagtcctgccagggcacacgtggctgcagccaaccttgtatcggcttacgagcagacagtaaaggaagagcgtaacttccaaaagtcttttaataatcatgtgcgaaccctgattgcccgcgaagaagttacccttggtttgatgcatttgtgggatttgatggaagctatcattcagaaccctactagcaaacctctgaccgcccagctgtttctggtggtgcaacacagcagagacaatgaggctttcagagaggcgctgctgaacatcaccgaacccgaggggagatggttgtatgatcttatcaacattctacagagtatcatagtgcaggagcggagcctgggcctggccgagaaggtggctgccatcaattactcggttttgagcttgggaaaatattacgctcgcaaaatctacaagactccatacgttcccatagacaaggaggtgaagatagatgggttctacatgcgcatgacgctcaaggtcttgaccctgagcgatgatcttggggtgtatcgcaatgacagaatgcatcgcgcggttagcgccagcaggaggcgcgagttaagcgacagggaactgatgcacagtttgcaaagagctctgactggagctggaaccgagggtgagaattacttcgacatgggagctgacttgcagtggcagcctagtcgcagggctctgagcgccgcgacggcaggatgtgagcttccttacatagaagaggcggatgaaggcgaggaggaagagggcgagtacttggaagactgatggcacaacccgtgttttttgctagatggaacagcaagcaccggatcccgcaatgcgggcggcgctgcagagccagccgtccggcattaactcctcggacgattggacccaggccatgcaacgtatcatggcgttgacgactcgcaaccccgaagcctttagacagcaaccccaggccaaccgtctatcggccatcatggaagctgtagtgccttcccgctctaatcccactcatgagaaggtcctggccatcgtgaacgcgttggtggagaacaaagctattcgtccagatgaggccggactggtatacaacgctctcttagaacgcgtggctcgctacaacagtagcaatgtgcaaaccaatttggaccgtatgataacagatgtacgcgaagccgtgtctcagcgcgaaaggttccagcgtgatgccaacctgggttcgctggtggcgttaaatgctttcttgagtactcagcctgctaatgtgccgcgtggtcaacaggattatactaactttttaagtgctttgagactgatggtatcagaagtacctcagagcgaagtgtatcagtccggtcctgattacttctttcagactagcagacagggcttgcagacggtaaatctgagccaagcttttaaaaaccttaaaggtttgtggggagtgcatgccccggtaggagaaagagcaaccgtgtctagcttgttaactccgaactcccgcctattattactgttggtagctcctttcaccgacagcggtagcatcgaccgtaattcctatttgggttacctactaaacctgtatcgcgaagccatagggcaaagtcaggtggacgagcagacctatcaagaaattacccaagtcagtcgcgctttgggacaggaagacactggcagtttggaagccactctgaacttcttgcttaccaatcggtctcaaaagatccctcctcaatatgctcttactgcggaggaggagaggatccttagatatgtgcagcagagcgtgggattgtttctgatgcaagagggggcaactccgactgcagcactggacatgacagcgcgaaatatggagcccagcatgtatgccagtaaccgacctttcattaacaaactgctggactacttgcacagagctgccgctatgaactctgattatttcaccaatgccatcttaaacccgcactggctgcccccacctggtttctacacgggcgaatatgacatgcccgaccctaatgacggatttctgtgggacgacgtggacagcgatgttttttcacctctttctgatcatcgcacgtggaaaaaggaaggcggcgatagaatgcattcttctgcatcgctgtccggggtcatgggtgctaccgcggctgagcccgagtctgcaagtccttttcctagtctacccttttctctacacagtgtacgtagcagcgaagtgggtagaataagtcgcccgagtttaatgggcgaagaggagtatctaaacgattccttgctcagaccggcaagagaaaaaaatttcccaaacaatggaatagaaagtttggtggataaaatgagtagatggaagacttatgctcaggatcacagagacgagcctgggatcatggggattacaagtagagcgagccgtagacgccagcgccatgacagacagaggggtcttgtgtgggacgatgaggattcggccgatgatagcagcgtgctggacttgggtgggagaggaaggggcaacccgtttgctcatttgcgccctcgcttgggtggtatgttgtaaaaaaaaataaaaaaaaaactcaccaaggccatggcgacgagcgtacgttcgttcttctttattatctgtgtctagtataatgaggcgagtcgtgctaggcggagcggtggtgtatccggagggtcctcctccttcgtacgagagcgtgatgcagcagcagcaggcgacggcggtgatgcaatccccactggaggctccctttgtgcctccgcgatacctggcacctacggagggcagaaacagcattcgttattcggaactggcacctcagtacgataccaccaggttgtatctggtggacaacaagtcggcggacattgcttctctgaactatcagaatgaccacagcaacttcttgaccacggtggtgcaaaacaatgactttacccctacggaagccagcacccagaccattaactttgatgaacgatcgcggtggggcggtcagctaaagaccatcatgcatactaacatgccaaacgtgaacgagtatatgtttagtaacaagttcaaagcgcgtgtgatggtgtccagaaaacctcccgacggtgctgcagttggggatacttatgatcacaagcaggatattttgaaatatgagtggttcgagtttactttgccagaaggcaacttttcagttactatgactattgatttgatgaacaatgccatcatagataattacttgaaagtgggtagacagaatggagtgcttgaaagtgacattggtgttaagttcgacaccaggaacttcaagctgggatgggatcccgaaaccaagttgatcatgcctggagtgtatacgtatgaagccttccatcctgacattgtcttactgcctggctgcggagtggattttaccgagagtcgtttgagcaaccttcttggtatcagaaaaaaacagccatttcaagagggttttaagattttgtatgaagatttagaaggtggtaatattccggccctcttggatgtagatgcctatgagaacagtaagaaagaacaaaaagccaaaatagaagctgctacagctgctgcagaagctaaggcaaacatagttgccagcgactctacaagggttgctaacgctggagaggtcagaggagacaattttgcgccaacacctgttccgactgcagaatcattattggccgatgtgtctgaaggaacggacgtgaaactcactattcaacctgtagaaaaagatagtaagaatagaagctataatgtgttggaagacaaaatcaacacagcctatcgcagttggtatctttcgtacaattatggcgatcccgaaaaaggagtgcgttcctggacattgctcaccacctcagatgtcacctgcggagcagagcaggtctactggtcgcttccagacatgatgaaggatcctgtcactttccgctccactagacaagtcagtaactaccctgtggtgggtgcagagcttatgcccgtcttctcaaagagcttctacaacgaacaagctgtgtactcccagcagctccgccagtccacctcgcttacgcacgtcttcaaccgctttcctgagaaccagattttaatccgtccgccggcgcccaccattaccaccgtcagtgaaaacgttcctgctctcacagatcacgggaccctgccgttgcgcagcagtatccggggagtccaacgtgtgaccgttactgacgccagacgccgcacctgtccctacgtgtacaaggcactgggcatagtcgcaccgcgcgtcctttcaagccgcactttctaaaaaaaaaaaaaatgtccattcttatctcgcccagtaataacaccggttggggtctgcgcgctccaagcaagatgtacggaggcgcacgcaaacgttctacccaacatcctgtccgtgttcgcggacattttcgcgctccatggggcgccctcaagggccgcactcgcgttcgaaccaccgtcgatgatgtaatcgatcaggtggttgccgacgcccgtaattatactcctactgcgcctacatctactgtggatgcagttattgacagtgtagtggctgacgctcgcaactatgctcgacgtaagagccggcgaaggcgcattgccagacgccaccgagctaccactgccatgcgagccgcaagagctctgctacgaagagctagacgcgtggggcgaagagccatgcttagggcggccagacgtgcagcttcgggcgccagcgccggcaggtcccgcaggcaagcagccgctgtcgcagcggcgactattgccgacatggcccaatcgcgaagaggcaatgtatactgggtgcgtgacgctgccaccggtcaacgtgtacccgtgcgcacccgtccccctcgcacttagaagatactgagcagtctccgatgttgtgtcccagcggcgaggatgtccaagcgcaaatacaaggaagaaatgctgcaggttatcgcacctgaagtctacggccaaccgttgaaggatgaaaaaaaaccccgcaaaatcaagcgggttaaaaaggacaaaaaagaagaggaagatggcgatgatgggctggcggagtttgtgcgcgagtttgccccacggcgacgcgtgcaatggcgtgggcgcaaagttcgacatgtgttgagacctggaacttcggtggtctttacacccggcgagcgttcaagcgctacttttaagcgttcctatgatgaggtgtacggggatgatgatattcttgagcaggcggctgaccgattaggcgagtttgcttatggcaagcgtagtagaataacttccaaggatgagacagtgtcgatacccttggatcatggaaatcccacccctagtcttaaaccggtcactttgcagcaagtgttacccgtaactccgcgaacaggtgttaaacgcgaaggtgaagatttgtatcccactatgcaactgatggtacccaaacgccagaagttggaggacgttttggagaaagtaaaagtggatccagatattcaacctgaggttaaagtgagacccattaagcaggtagcgcctggtctgggggtacaaactgtagacattaagattcccactgaaagtatggaagtgcaaactgaacccgcaaagcctactgccacctccactgaagtgcaaacggatccatggatgcccatgcctattacaactgacgccgccggtcccactcgaagatcccgacgaaagtacggtccagcaagtctgttgatgcccaattatgttgtacacccatctattattcctactcctggttaccgaggcactcgctactatcgcagccgaaacagtacctcccgccgtcgccgcaagacacctgcaaatcgcagtcgtcgccgtagacgcacaagcaaaccgactcccggcgccctggtgcggcaagtgtaccgcaatggtagtgcggaacctttgacactgccgcgtgcgcgttaccatccgagtatcatcacttaatcaatgttgccgctgcctccttgcagatatggccctcacttgtcgccttcgcgttcccatcactggttaccgaggaagaaactcgcgccgtagaagagggatgttgggacgcggaatgcgacgctacaggcgacggcgtgctatccgcaagcaattgcggggtggttttttaccagccttaattccaattatcgctgctgcaattggcgcgataccaggcatagcttccgtggcggttcaggcctcgcaacgacattgacattggaaaaaaacgtataaataaaaaaaaaaaaatacaatggactctgacactcctggtcctgtgactatgttttcttagagatggaagacatcaatttttcatccttggctccgcgacacggcacgaagccgtacatgggcacctggagcgacatcggcacgagccaactgaacgggggcgccttcaattggagcagtatctggagcgggcttaaaaattttggctcaaccataaaaacatacgggaacaaagcttggaacagcagtacaggacaggcgcttagaaataaacttaaagaccagaacttccaacaaaaagtagtcgatgggatagcttccggcatcaatggagtggtagatttggctaaccaggctgtgcagaaaaagataaacagtcgtttggacccgccgccagcaaccccaggtgaaatgcaagtggaggaagaaattcctccgccagaaaaacgaggcgacaagcgtccgcgtcccgatttggaagagacgctggtgacgcgcgtagatgaaccgccttcttatgaggaagcaacgaagcttggaatgcccaccactagaccgatagccccaatggccaccggggtgatgaaaccttctcagttgcatcgacccgtcaccttggatttgccccctccccctgctgctactgctgtacccgcttctaagcctgtcgctgccccgaaaccagtcgccgtagccaggtcacgtcccgggggcgctcctcgtccaaatgcgcactggcaaaatactctgaacagcatcgtgggtctaggcgtgcaaagtgtaaaacgccgtcgctgcttttaattaaatatggagtagcgcttaacttgcctatctgtgtatatgtgtcattacacgccgtcacagcagcagaggaaaaaaggaagaggtcgtgcgtcgacgctgagttactttcaagatggccaccccatcgatgctgccccaatgggcatacatgcacatcgccggacaggatgcttcggagtacctgagtccgggtctggtgcagttcgcccgcgccacagacacctacttcaatctgggaaataagtttagaaatcccaccgtagcgccgacccacgatgtgaccaccgaccgtagccagcggctcatgttgcgcttcgtgcccgttgaccgggaggacaatacatactcttacaaagtgcggtacaccctggccgtgggcgacaacagagtgctggatatggccagcacgttctttgacattaggggtgtgttggacagaggtcccagtttcaaaccctattctggtacggcttacaactccctggctcctaaaggcgctccaaatacatctcagtggattgcagaaggtgtaaaaaatacaactggtgaggaacacgtaacagaagaggaaaccaatactactacttacacttttggcaatgctcctgtaaaagctgaagctgaaattacaaaagaaggactcccagtaggtttggaagtttcagatgaagaaagtaaaccgatttatgctgataaaacatatcagccagaacctcagctgggagatgaaacttggactgaccttgatggaaaaaccgaaaagtatggaggcagggctctcaaacccgatactaagatgaaaccatgctacgggtcctttgccaaacctactaatgtgaaaggcggtcaggcaaaacaaaaaacaacggagcagccaaatcagaaagtcgaatatgatatcgacatggagttttttgatgcggcatcgcagaaaacaaacttaagtcctaaaattgtcatgtatgcagaaaatgtaaatttggaaactccagacactcatgtagtgtacaaacctggaacagaagacacaagttccgaagctaatttgggacaacaatctatgcccaacagacccaactacattggcttcagagataactttattggacttatgtactataacagtactggtaacatgggggtgctggctggtcaagcgtctcagttaaatgcagtggttgacttgcaggacagaaacacagaactttcttaccaactcttgcttgactctctgggcgacagaaccagatactttagcatgtggaatcaggctgtggacagttatgatcctgatgtacgtgttattgaaaatcatggtgtggaagatgaacttcccaactactgttttccactggacggcataggtgttccaacaaccagttacaaatcaatagttccaaatggagacaatgcgcctaattggaaggaacctgaagtaaatggaacaagtgagatcggacagggtaatttgtttgccatggaaattaaccttcaagccaatctatggcgaagtttcctttattccaatgtggctctatatctcccagactcgtacaaatacaccccgtccaatgtcactcttccagaaaacaaaaacacctacgactacatgaacgggcgggtggtgccgccatctctagtagacacctatgtgaacattggtgccaggtggtctctggatgccatggacaatgtcaacccattcaaccaccaccgtaacgctggcttgcgttaccgatccatgcttctgggtaacggacgttatgtgcctttccacatacaagtgcctcaaaaattcttcgctgttaaaaacctgctgcttctcccaggctcctacacttatgagtggaactttaggaaggatgtgaacatggttctacagagttccctcggtaacgacctgcgggtagatggcgccagcatcagtttcacgagcatcaacctctatgctacttttttccccatggctcacaacaccgcttccacccttgaagccatgctgcggaatgacaccaatgatcagtcattcaacgactacctatctgcagctaacatgctctaccccattcctgccaatgcaaccaatattcccatttccattccttctcgcaactgggcggctttcagaggctggtcatttaccagactgaaaaccaaagaaactccctctttggggtctggatttgacccctactttgtctattctggttctattccctacctggatggtaccttctacctgaaccacacttttaagaaggtttccatcatgtttgactcttcagtgagctggcctggaaatgacaggttactatctcctaacgaatttgaaataaagcgcactgtggatggcgaaggctacaacgtagcccaatgcaacatgaccaaagactggttcttggtacagatgctcgccaactacaacatcggctatcagggcttctacattccagaaggatacaaagatcgcatgtattcatttttcagaaacttccagcccatgagcaggcaggtggttgatgaggtcaattacaaagacttcaaggccgtcgccataccctaccaacacaacaactctggctttgtgggttacatggctccgaccatgcgccaaggtcaaccctatcccgctaactatccctatccactcattggaacaactgccgtaaatagtgttacgcagaaaaagttcttgtgtgacagaaccatgtggcgcataccgttctcgagcaacttcatgtctatgggggcccttacagacttgggacagaatatgctctatgccaactcagctcatgctctggacatgacctttgaggtggatcccatggatgagcccaccctgctttatcttctcttcgaagttttcgacgtggtcagagtgcatcagccacaccgcggcatcatcgaggcagtctacctgcgtacaccgttctcggccggtaacgctaccacgtaagaagcttcttgcttcttgcaaatagcagctgcaaccatggcctgcggatcccaaaacggctccagcgagcaagagctcagagccattgtccaagacctgggttgcggaccctattttttgggaacctacgataagcgcttcccggggttcatggcccccgataagctcgcctgtgccattgtaaatacggccggacgtgagacggggggagagcactggttggctttcggttggaacccacgttctaacacctgctacctttttgatccttttggattctcggatgatcgtctcaaacagatttaccagtttgaatatgagggtctcctgcgccgcagcgctcttgctaccaaggaccgctgtattacgctggaaaaatctacccagaccgtgcagggtccccgttctgccgcctgcggacttttctgctgcatgttccttcacgcctttgtgcactggcctgaccgtcccatggacggaaaccccaccatgaaattgctaactggagtgccaaacaacatgcttcattctcctaaagtccagcccaccctgtgtgacaatcaaaaagcactctaccattttcttaatacccattcgccttattttcgctcccatcgtacacacatcgaaagggccactgcgttcgaccgtatggatgttcaataatgactcatgtaaacaacgtgttcaataaacatcactttatttttttacatgtatcaaggctctgcattacttatttatttacaagtcgaatgggttctgacgagaatcagaatgacccgcaggcagtgatacgttgcggaactgatacttgggttgccacttgaattcgggaatcaccaacttgggaaccggtatatcgggcaggatgtcactccacagctttctggtcagctgcaaagctccaagcaggtcaggagccgaaatcttgaaatcacaattaggaccagtgctttgagcgcgagagttgcggtacaccggattgcagcactgaaacaccatcagcgacggatgtctcacgcttgccagcacggtgggatctgcaatcatgcccacatccagatcttcagcattggcaatgctgaacggggtcatcttgcaggtctgcctacccatggcgggcacccaattaggcttgtggttgcaatcgcagtgcagggggatcagtatcatcttggcctgatcctgtctgattcctggatacacggctctcatgaaagcatcatattgcttgaaagcctgctgggctttactaccctcggtataaaacatcccgcaggacctgctcgaaaactggttagctgcacagccggcatcattcacacagcagcgggcgtcattgttagctatttgcaccacacttctgccccagcggttttgggtgattttggttcgctcgggattctcctttaaggctcgttgtccgttctcgctggccacatccatctcgataatctgctccttctgaatcataatattgccatgcaggcacttcagcttgccctcataatcattgcagccatgaggccacaacgcacagcctgtacattcccaattatggtgggcgatctgagaaaaagaatgtatcattccctgcagaaatcttcccatcatcgtgctcagtgtcttgtgactagtgaaagttaactggatgcctcggtgctcctcgtttacgtactggtgacagatgcgcttgtattgttcgtgttgctcaggcattagtttaaaagaggttctaagttcgttatccagcctgtacttctccatcagcagacacatcacttccatgcctttctcccaagcagacaccaggggcaagctaatcggattcttaacagtgcaggcagcagctcctttagccagagggtcatctttagcgatcttctcaatgcttcttttgccatccttctcaacgatgcgcacgggcgggtagctgaaacccactgctacaagttgcgcctcttctctttcttcttcgctgtcttgactgatgtcttgcatggggatatgtttggtcttccttggcttctttttggggggtatcggaggaggaggactgtcgctccgttccggagacagggaggattgtgacgtttcgctcaccattaccaactgactgtcggtagaagaacctgaccccacacggcgacaggtgtttctcttcgggggcagaggtggaggcgattgcgaagggctgcggtccgacctggaaggcggatgactggcagaaccccttccgcgttcgggggtgtgctccctgtggcggtcgcttaactgatttccttcgcggctggccattgtgttctcctaggcagagaaacaacagacatggaaactcagccattgctgtcaacatcgccacgagtgccatcacatctcgtcctcagcgacgaggaaaaggagcagagcttaagcattccaccgcccagtcctgccaccacctctaccctagaagataaggaggtcgacgcatctcatgacatgcagaataaaaaagcgaaagagtctgagacagacatcgagcaagacccgggctatgtgacaccggtggaacacgaggaagagttgaaacgctttctagagagagaggatgaaaactgcccaaaacaacgagcagataactatcaccaagatgctggaaatagggatcagaacaccgactacctcatagggcttgacggggaagacgcgctccttaaacatctagcaagacagtcgctcatagtcaaggatgcattattggacagaactgaagtgcccatcagtgtggaagagctcagccgcgcctacgagcttaacctcttttcacctcgtactccccccaaacgtcagccaaacggcacctgcgagccaaatcctcgcttaaacttttatccagcttttgctgtgccagaagtactggctacctatcacatcttttttaaaaatcaaaaaattccagtctcctgccgcgctaatcgcacccgcgccgatgccctactcaatctgggacctggttcacgcttacctgatatagcttccttggaagaggttccaaagatcttcgagggtctgggcaataatgagactcgggccgcaaatgctctgcaaaagggagaaaatggcatggatgagcatcacagcgttctggtggaattggaaggcgataatgccagactcgcagtactcaagcgaagcatcgaggtcacacacttcgcatatcccgctgtcaacctgccccctaaagtcatgacggcggtcatggaccagttactcattaagcgcgcaagtcccctttcagaagacatgcatgacccagatgcctgtgatgagggtaaaccagtggtcagtgatgagcagctaacccgatggctgggcaccgactctcccagggatttggaagagcgtcgcaagcttatgatggccgtggtgctggttaccgtagaactagagtgtctccgacgtttctttaccgattcagaaaccttgcgcaaactcgaagagaatctgcactacacttttagacacggctttgtgcggcaggcatgcaagatatctaacgtggaactcaccaacctggtttcctacatgggtattctgcatgagaatcgcctaggacaaagcgtgctgcacagcaccctgaagggggaagcccgccgtgattacatccgcgattgtgtctatctgtacctgtgccacacgtggcaaaccggcatgggtgtatggcagcaatgtttagaagaacagaacttgaaagagcttgacaagctcttacagaaatctcttaaggttctgtggacagggttcgacgagcgcaccgtcgcttccgacctggcagacctcatcttcccagagcgtctcagggttactttgcgaaacggattgcctgactttatgagccagagcatgcttaacaattttcgctctttcatcctggaacgctccggtatcctgcccgccacctgctgcgcactgccctccgactttgtgcctctcacctaccgcgagtgccccccgccgctatggagtcactgctacctgttccgtctggccaactatctctcctaccactcggatgtgatcgaggatgtgagcggagacggcttgctggagtgtcactgccgctgcaatctgtgcacgccccaccggtccctagcttgcaacccccagttgatgagcgaaacccagataataggcacctttgaattgcaaggccccagcagccaaggcgatgggtcttctcctgggcaaagtttaaaactgaccccgggactgtggacctccgcctacttgcgcaagtttgctccggaagattaccacccctatgaaatcaagttctatgaggaccaatcacagcctccaaaggccgaactttcggcctgcgtcatcacccagggggcaattctggcccaattgcaagccatccaaaaatcccgccaagaatttctactgaaaaagggtaagggggtctaccttgacccccagaccggcgaggaactcaacacaaggttccctcaggatgtcccaacgacgagaaaacaagaagttgaaggtgcagccgccgcccccagaagatatggaggaagattgggacagtcaggcagaggaggcggaggaggacagtctggaggacagtctggaggaagacagtttggaggaggaaaacgaggaggcagaggaggtggaagaagtaaccgccgacaaacagttatcctcggctgcggagacaagcaacagcgctaccatctccgctccgagtcgaggaacccggcggcgtcccagcagtagatgggacgagaccggacgcttcccgaacccaaccagcgcttccaagaccggtaagaaggatcggcagggatacaagtcctggcgggggcataagaatgccatcatctcctgcttgcatgagtgcgggggcaacatatccttcacgcggcgctacttgctattccaccatggggtgaactttccgcgcaatgttttgcattactaccgtcacctccacagcccctactatagccagcaaatcccggcagtctcgacagataaagacagcggcggcgacctccaacagaaaaccagcagcggcagttagaaaatacacaacaagtgcagcaacaggaggattaaagattacagccaacgagccagcgcaaacccgagagttaagaaatcggatctttccaaccctgtatgccatcttccagcagagtcggggtcaagagcaggaactgaaaataaaaaaccgatctctgcgttcgctcaccagaagttgtttgtatcacaagagcgaagatcaacttcagcgcactctcgaggacgccgaggctctcttcaacaagtactgcgcgctgactcttaaagagtaggcagcgaccgcgcttattcaaaaaaggcgggaattacatcatcctcgacatgagtaaagaaattcccacgccttacatgtggagttatcaaccccaaatgggattggcggcaggcgcctcccaggactactccacccgcatgaattggctcagcgccgggccttctatgatttctcgagttaatgatatacgcgcctaccgaaaccaaatacttttggaacagtcagctcttaccaccacgccccgccaacaccttaatcccagaaattggcccgccgccctagtgtaccaggaaagtcccgctcccaccactgtattacttcctcgagacgcccaggccgaagtccaaatgactaatgcaggtgcgcagttagctggcggctccaccctatgtcgtcacaggcctcggcataatataaaacgcctgatgatcagaggccgaggtatccagctcaacgacgagtcggtgagctctccgcttggtctacgaccagacggaatctttcagattgccggctgcgggagatcttccttcacccctcgtcaggctgttctgactttggaaagttcgtcttcgcaaccccgctcgggcggaatcgggaccgttcaatttgtggaggagtttactccctctgtctacttcaaccccttctccggatctcctgggcattacccggacgagttcataccgaacttcgacgcgattagcgagtcagtggacggctacgattgatgtctggtgacgcggctgagctatctcggctgcgacatctagaccactgccgccgctttcgctgctttgcccgggaactcattgagttcatctacttcgaactccccaaggatcaccctcaaggtccggcccacggagtgcggatttctatcgaaggcaaaatagactctcgcctgcaacgaattttctcccagcggcccgtgctgatcgagcgagaccagggaaacaccacggtttccatctactgcatttgtaatcaccccggattgcatgaaagcctttgctgtcttatgtgtactgagtttaataaaaactgaattaagactctcctacggactgccgcttcttcaacccggattttacaaccagaagaacgaaacttttcctgtcgtccaggactctgttaacttcacctttcctactcacaaactagaagctcaacgactacaccgcttttccagaagcattttccctactaatactactttcaaaaccggaggtgagctccaaggtcttcctacagaaaacccttgggtggaagcgggccttgtagtgctaggaattcttgcgggtgggcttgtgattattctttgctacctatacacaccttgcttcactttcttagtggtgttgtggtattggtttaaaaaatggggcccatactagtcttgcttgttttactttcgcttttggaaccgggttctgccaattacgatccatgtctagacttcgacccagaaaactgcacacttacttttgcacccgacacaagccgcatctgtggagttcatcgcctctcttacgaacttggcccccaacgacaaaaatttacctgcatggtgggaatcaaccccatagttatcacccagcaaagtggagatactaagggttgcattcactgctcctgcgattccatcgagtgcacctacaccctgctgaagaccctatgcggcctaagagacctgctaccaatgaattaaaaaatgattaataaaaaatcacttacttgaaatcagcaataaggtctctgttgaaattttctcccagcagcacctcacttccctcttcccaactctggtattctaaaccccgttcagcggcatactttctccatactttaaaggggatgtcaaattttagctcctctcctgtacccacaatcttcatgtctttcttcccagatgaccaagagagtccggctcagtgactccttcaaccctgtctacccctatgaagatgaaagcacctcccaacacccctttataaacccagggtttatttccccaaatggcttcacacaaagcccaaacggagttcttactttaaaatgtttaaccccactaacaaccacaggcggatctctacagctaaaagtgggagggggacttacagtggatgacaccaacggttttttgaaagaaaacataagtgccaccacaccactcgttaagactggtcactctataggtttaccactaggagccggattgggaacgaatgaaaataaactttgtatcaaattaggacaaggacttacattcaattcaaacaacatttgcattgatgacaatattaacaccttatggacaggagtcaaccccaccgaagccaactgtcaaatcatgaactccagtgaatctaatgattgcaaattaattctaacactagttaaaactggagcactagtcactgcatttgtttatgttataggagtatctaacaattttaatatgctaactacacacagaaatataaattttactgcagagctgtttttcgattctactggtaatttactaactagactctcatccctcaaaactccacttaatcataaatcaggacaaaacatggctactggtgccattactaatgctaaaggtttcatgcccagcacgactgcctatcctttcaatgataattctagagaaaaagaaaactacatttacggaacttgttactacacagctagtgatcgcactgcttttcccattgacatatctgtcatgcttaaccgaagagcaataaatgacgagacatcatattgtattcgtataacttggtcctggaacacaggagatgccccagaggtgcaaacctctgctacaaccctagtcacctccccatttaccttttactacatcagagaagacgactgacaaataaagtttgcgatcgccaggcccaccatgaaaaagagcggcgtgctctttctgctcggaattatcctcctggtgctcatcggcgtccagggcacacccgtcgtccggaaaggcagatgcagctgtatttccactaatcagggcaccattcatctgcagagcttaaaggatctgaagcagttcgctccctccccctcttgtgaaaagatcgagattatcgccaccctcaaaaacggcgtgcagacctgcctgaatcctgacagcgccgacgtcaaagagctcatcaagaaatgggaaaagcaagtgtcccagaaaaagaaacagaaaaacggaaagaagcaccagaagaaaaaggtcctcaaggtccggaagtcccagcggtccagacagaagaaaaccaccggcagtggcgtcaagcaaacccttaacttcgatctgctgaaactggccggcgatgtcgaatctaatcccggccccgctttaacattcgccttgctggtcgccctgctcgtcctgtcctgtaaatccagttgttccgtgggttgcgacctcccacagacacattccctcggctctagacgcacattaatgctgctcgcccaaatgagacggatttccctgttttcatgtctgaaagataggcacgatttcggcttccctcaagaagaattcggaaatcaatttcagaaagccgagacaattcccgtgcttcacgaaatgattcaacaaatttttaacctgttctccaccaaagatagctccgccgcctgggacgaaacactgctcgataagttttataccgagctttatcaacagctcaacgatctcgaggcttgcgtcattcaaggcgtcggcgttaccgaaaccccactcatgaaagaagattctatcctcgccgtccggaagtattttcagcgcattaccctgtacctcaaggaaaaaaagtattccccctgcgcttgggaagtcgttcgcgctgagattatgaggtccttctcactctctaccaatctccaggagagccttcggtccaaagagggcagtggccaatgcaccaactacgccctgcttaagctggccggcgacgtcgaaagtaatcccggcccaccactcctcctgctcctccctctcctttgggccggcgctctcgccaattgggtcaacgtgatcagcgacctcaagaaaatcgaggacctcatccagtccatgcacatcgacgccacactgtacaccgagagcgacgtgcatcctagctgtaaggtcaccgctatgaaatgtttcctgctcgaacttcaggtcatctccctggaaagcggcgacgccagcatccacgacaccgtggagaacctcattatcctggccaataatagcctttccagcaacggcaacgtcaccgagtccggctgtaaggagtgcgaagagctcgaagagaagaacatcaaggagttcctgcaaagcttcgtccacatcgtgcagatgtttattaatacctccggctccggcgaagggcggggcagcctcctgacctgtggagatgtggaagaaaaccccggcccaatgtgccatcaacaacttgtgatttcctggttcagcctcgtgttcctcgcctcccctctggtcgctatctgggagctcaaaaaggacgtctacgtggtcgagcttgactggtaccccgacgctccaggcgagatggtcgtgctgacatgcgatacacccgaggaggacggcattacatggacactggatcaatccagcgaagtgctgggatccggaaagacactcacaattcaggtgaaggaattcggcgacgccggacaatatacatgccataagggcggagaagtgctgtcccactccctgctcctcttacataagaaagaggacggcatctggtctaccgacatcctcaaagatcaaaaggagccaaagaacaaaacattcctgcgctgtgaagctaaaaactactccggcagatttacatgttggtggctcaccaccattagcaccgacctcacctttagcgtgaagagttcccggggatccagcgatcctcagggcgtcacctgtggcgccgcaaccctgtccgccgaacgggtgcggggcgataataaagaatacgaatattccgtcgaatgtcaagaagatagcgcttgtcccgccgcagaagaaagcctccctatcgaagtgatggtcgacgctgtgcataaactgaaatacgagaattatacaagttcctttttcattcgggatattatcaagcccgatcccccaaaaaatctccaactcaaacccctcaaaaactccagacaagtcgaagtgtcctgggaatatcccgatacatggagcaccccccactcttattttagcctcaccttttgtgtgcaagtgcaaggaaaatccaaacgcgagaaaaaggaccgcgtgtttaccgataaaacatccgctaccgtgatttgtcggaagaacgcttccatcagtgtccgcgctcaagatcggtattactcctcctcctggagtgagtgggcctccgtcccatgtagcggcggaggtgggagtggcggcgggggttccggagggggtggctcccgcaatctgcctgtcgctacccccgatcccggcatgtttccctgtctgcatcatagccagaatctcctcagagctgtgagtaatatgctgcaaaaagctcgccagaccctggagttctatccctgtacctccgaggaaatcgaccacgaggacattaccaaggacaagacatctaccgtcgaagcttgcctgccccttgagctgacaaaaaacgaaagctgtctgaactctcgcgaaacatcctttatcaccaacggaagctgtctcgcttctcggaaaacatccttcatgatggctctctgtctgagcagcatctacgaggatcttaaaatgtatcaagtcgaatttaagacaatgaacgccaaactcctgatggacccaaaacggcaaattttcctggaccagaatatgctcgccgtgatcgacgaactcatgcaagctctcaactttaatagcgaaaccgtcccccagaagtcttctctcgaggagcccgacttctacaagaccaagattaaactgtgtatcctgctccacgcctttcggatccgcgccgtcaccatcgacagggtcatgtcctacctgaacgcctcttaagctagcttgactgactgagatacagcgtaccttcagctcacagacatgataagatacattgatgagtttggacaaaccacaactagaatgcagtgaaaaaaatgctttatttgtgaaatttgtgatgctattgctttatttgtaaccattataagctgcaataaacaagttaacaacaacaattgcattcattttatgtttcaggttcagggggaggtgtgggaggttttttaaagcaagtaaaacctctacaaatgtggtagtcgtcagctatcctgcaggaacttgtttatttgaaaatcaattcacaaaatccgagtagttattttgcctcccccttcccatttaacagaatacaccaatctctccccacgcacagctttaaacatttggataccattagatatagacatggttttagattccacattccaaacagtttcagagcgagccaatctggggtcagtgatagataaaaatccatcgggatagtcttttaaagcgctttcacagtccaactgctgcggatgcgactccggagtctggatcacggtcatctggaagaagaacgatgggaatcataatccgaaaacggtatcggacgattgtgtctcatcaaacccacaagcagccgctgtctgcgtcgctccgtgcgactgctgtttatgggatcagggtccacagtgtcctgaagcatgattttaatagcccttaacatcaactttctggtgcgatgcgcgcagcaacgcattctgatttcactcaaatctttgcagtaggtacaacacattattacaatattgtttaataaaccataattaaaagcgctccagccaaaactcatatctgatataatcgcccctgcatgaccatcataccaaagtttaatataaattaaatgacgttccctcaaaaacacactacccacatacatgatctcttttggcatgtgcatattaacaatctgtctgtaccatggacaacgttggttaatcatgcaacccaatataaccttccggaaccacactgccaacaccgctcccccagccatgcattgaagtgaaccctgctgattacaatgacaatgaagaacccaattctctcgaccgtgaatcacttgagaatgaaaaatatctatagtggcacaacatagacataaatgcatgcatcttctcataatttttaactcctcaggatttagaaacatatcccagggaataggaagctcttgcagaacagtaaagctggcagaacaaggaagaccacgaacacaacttacactatgcatagtcatagtatcacaatctggcaacagcgggtggtcttcagtcatagaagctcgggtttcattttcctcacaacgtggtaactgggctctggtgtaagggtgatgtctggcgcatgatgtcgagcgtgcgcgcaaccttgtcataatggagttgcttcctgacattctcgtattttgtatagcaaaacgcggccctggcagaacacactcttcttcgccttctatcctgccgcttagcgtgttccgtgtgatagttcaagtacaaccacactcttaagttggtcaaaagaatgctggcttcagttgtaatcaaaactccatcgcatctaatcgttctgaggaaatcatccaagcaatgcaactggattgtgtttcaagcaggagaggagagggaagagacggaagaaccatgttaatttttattccaaacgatctcgcagtacttcaaattgtagatcgcgcagatggcatctctcgcccccactgtgttggtgaaaaagcacagctagatcaaaagaaatgcgattttcaaggtgctcaacggtggcttccagcaaagcctccacgcgcacatccaagaacaaaagaataccaaaagaaggagcattttctaactcctcaatcatcatattacattcctgcaccattcccagataattttcagctttccagccttgaattattcgtgtcagttcttgtggtaaatccaatccacacattacaaacaggtcccggagggcgccctccaccaccattcttaaacacaccctcataatgacaaaatatcttgctcctgtgtcacctgtagcgaattgagaatggcaacatcaattgacatgcccttggctctaagttcttctttaagttctagttgtaaaaactctctcatattatcaccaaactgcttagccagaagccccccgggaacaagagcaggggacgctacagtgcagtacaagcgcagacctccccaattggctccagcaaaaacaagattggaataagcatattgggaaccgccagtaatatcatcgaagttgctggaaatataatcaggcagagtttcttgtaaaaattgaataaaagaaaaatttgccaaaaaaacattcaaaacctctgggatgcaaatgcaataggttaccgcgctgcgctccaacattgttagttttgaattagtctgcaaaaataaaaaaaaaaacaagcgtcatatcatagtagcctgacgaacagatggataaatcagtctttccatcacaagacaagccacagggtctccagctcgaccctcgtaaaacctgtcatcatgattaaacaacagcaccgaaagttcctcgcggtgaccagcatgaataattcttgatgaagcatacaatccagacatgttagcatcagttaacgagaaaaaacagccaacatagcctttgggtataattatgcttaatcgtaagtatagcaaagccacccctcgcggatacaaagtaaaaggcacaggagaataaaaaatataattatttctctgctgctgttcaggcaacgtcgcccccggtccctctaaatacacatacaaagcctcatcagccatggcttaccagacaaagtacagcgggcacacaaagcacaagctctaaagtgactctccaacctctccacaatatatatatacacaagccctaaactgacgtaatgggagtaaagtgtaaaaaatcccgccaaacccaacacacaccccgaaactgcgtcaccagggaaaagtacagtttcacttccgcaatcccaacaggcgtaacttcctctttctcacggtacgtgatatcccactaacttgcaacgtcattttcccacggtcgcaccgccccttttagccgttaaccccacagccaatcaccacacgatccacactttttaaaatcacctcatttacatattggcaccattccatctataaggtatattatatagataga

SEQ ID NO: 219 - DNA, 35236 bp, Artificial Sequence
  Genome sequence of NG-785 virus
tctatctatataatataccttatagatggaatggtgccaatatgtaaatgaggtgattttaaaaagtgtggatcgtgtggtgattggctgtggggttaacggctaaaaggggcggtgcgaccgtgggaaaatgacgttttgtgggggtggagtttttttgcaagttgtcgcgggaaatgtgacgcataaaaaggcttttttctcacggaactacttagttttcccacggtatttaacaggaaatgaggtagttttgaccggatgcaagtgaaaattgttgattttcgcgcgaaaactgaatgaggaagtgtttttctgaataatgtggtatttatggcagggtggagtatttgttcagggccaggtagactttgacccattacgtggaggtttcgattaccgtgttttttacctgaatttccgcgtaccgtgtcaaagtcttctgtttttacgtaggtgtcagctgatcgctagggtatttatacctcagggtttgtgtcaagaggccactcttgagtgccagcgagaagagttttctcctctgcgccggcagtttaataataaaaaaatgagagatttgcgatttctgcctcaggaaataatctctgctgagactggaaatgaaatattggagcttgtggtgcacgccctgatgggagacgatccggagccacctgtgcagctttttgagcctcctacgcttcaggaactgtatgatttagaggtagagggatcggaggattctaatgaggaagctgtaaatggcttttttaccgattctatgcttttagctgctaatgaagggttagaattagatccgcctttggacacttttgatactccaggggtaattgtggaaagcggtacaggtgtaagaaaattacctgatttgagttccgtggactgtgatttgcactgctatgaagacgggtttcctccgagtgatgaggaggaccatgaaaaggagcagtccatgcagactgcagcgggtgagggagtgaaggctgccaatgttggttttcagttggattgcccggagcttcctggacatggctgtaagtcttgtgaatttcacaggaaaaatactggagtaaaggaactgttatgttcgctttgttatatgagaacgcactgccactttatttacagtaagtgtgtttaagttaaaatttaaaggaatatgctgtttttcacatgtatattgagtgtgagttttgtgcttcttattataggtcctgtgtctgatgctgatgaatcaccatctcctgattctactacctcacctcctgagattcaagcacctgttcctgtggacgtgcgcaagcccattcctgtgaagcttaagcctgggaaacgtccagcagtggaaaaacttgaggacttgttacagggtggggacggacctttggacttgagtacacggaaacgtccaagacaataagtgttccatatccgtgtttacttaaggtgacgtcaatatttgtgtgacagtgcaatgtaataaaaatatgttaactgttcactggtttttattgctttttgggcggggactcaggtatataagtagaagcagacctgtgtggttagctcataggagctggctttcatccatggaggtttgggccattttggaagaccttaggaagactaggcaactgttagagaacgcttcggacggagtctccggtttttggagattctggttcgctagtgaattagctagggtagtttttaggataaaacaggactataaacaagaatttgaaaagttgttggtagattgcccaggactttttgaagctcttaatttgggccatcaggttcactttaaagaaaaagttttatcagttttagacttttcaaccccaggtagaactgctgctgctgtggcttttcttacttttatattagataaatggatcccgcagactcatttcagcaggggatacgttttggatttcatagccacagcattgtggagaacatggaaggttcgcaagatgaggacaatcttaggttactggccagtgcagcctttgggtgtagcgggaatcctgaggcatccaccggtcatgccagcggttctggaggaggaacagcaagaggacaacccgagagccggcctggaccctccagtggaggaggcggagtagctgacttgtctcctgaactgcaacgggtgcttactggatctacgtccactggacgggataggggcgttaagagggagagggcatctagtggtactgatgctagatctgagttggctttaagtttaatgagtcgcagacgtcctgaaaccatttggtggcatgaggttcagaaagagggaagggatgaagtttctgtattgcaggagaaatattcactggaacaggtgaaaacatgttggttggagcctgaggatgattgggaggtggccattaaaaattatgccaagatagctttgaggcctgataaacagtataagattactagacggattaatatccggaatgcttgttacatatctggaaatggggctgaggtggtaatagatactcaagacaaggcagttattagatgctgcatgatggatatgtggcctggggtagtcggtatggaagcagtaacttttgtaaatgttaagtttaggggagatggttataatggaatagtgtttatggccaataccaaacttatattgcatggttgtagcttttttggtttcaacaatacctgtgtagatgcctggggacaggttagtgtacggggatgtagtttctatgcgtgttggattgccacagctggcagaaccaagagtcaattgtctctgaagaaatgcatatttcaaagatgtaacctgggcattctgaatgaaggcgaagcaagggtccgccactgcgcttctacagatactggatgttttattttgattaagggaaatgccagcgtaaagcataacatgatttgcggtgcttccgatgagaggccttatcaaatgctcacttgtgctggtgggcattgtaatatgctggctactgtgcatattgtttcccatcaacgcaaaaaatggcctgtttttgatcacaatgtgatgacgaagtgtaccatgcatgcaggtgggcgtagaggaatgtttatgccttaccagtgtaacatgaatcatgtgaaagtgttgttggaaccagatgccttttccagaatgagcctaacaggaatttttgacatgaacatgcaaatctggaagatcctgaggtatgatgatacgagatcgagggtacgcgcatgcgaatgcggaggcaagcatgccaggttccagccggtgtgtgtagatgtgactgaagatctcagaccggatcatttggttattgcccgcactggagcagagttcggatccagtggagaagaaactgactaaggtgagtattgggaaaactttggggtgggattttcagatggacagattgagtaaaaatttgttttttctgtcttgcagctgtcatgagtggaaacgcttcttttaaggggggagtcttcagcccttatctgacagggcgtctcccatcctgggcaggagttcgtcagaatgttatgggatctactgtggatggaagacccgtccaacccgccaattcttcaacgctgacctatgctactttaagttcttcacctttggacgcagctgcagctgccgccgccgcttctgttgccgctaacactgtgcttggaatgggttactatggaagcatcatggctaattccacttcctctaataacccttctaccctgactcaggacaagttacttgtccttttggcccagctggaggctttgacccaacgtctgggtgaactttctcagcaggtggtcgagttgcgagtacaaactgagtctgctgtcggcacggcaaagtctaaataaaaaaatcccagaatcaatgaataaataaacaagcttgttgttgatttaaaatcaagtgtttttatttcatttttcgcgcacggtatgccctagaccaccgatctctatcattgagaactcggtggattttttccaggatcctatagaggtgggattgaatgtttagatacatgggcattaggccgtctttggggtggagatagctccattgaagggattcatgctccggggtagtgttgtaaatcacccagtcataacaaggtcgcagtgcatggtgttgcacaatatcttttagaagtaggctgattgccacagataagcccttggtgtaggtgtttacaaaccggttgagctgggatgggtgcattcggggtgaaattatgtgcattttggattggatttttaagttggcaatattgccgccaagatcccgtcttgggttcatgttatgaaggaccaccaagacggtgtatccggtacatttaggaaatttatcgtgcagcttggatggaaaagcgtggaaaaatttggagacacccttgtgtcctccaagattttccatgcactcatccatgataatagcaatggggccgtgggcagcggcgcgggcaaacacgttccgtgggtctgacacatcatagttatgttcctgagttaaatcatcataagccattttaatgaatttggggcggagagtaccagattggggtatgaatgttccttcgggccccggagcatagttcccctcacagatttgcatttcccaagctttcagttccgagggtggaatcatgtccacctggggggctatgaaaaacaccgtttctggggcgggggtgattaattgtgatgatagcaaatttctgagcaattgagatttgccacatccggtggggccataaatgattccgattacgggttgcaggtggtagtttagggaacggcaactgccgtcttctcgaagcaagggggccacctcgttcatcatttcccttacatgcatattttcccgcaccaaatccattaggaggcgctctcctcctagtgatagaagttcttgtagtgaggaaaagtttttcagcggtttcagaccgtcagccatgggcattttggagagagtttgctgcaaaagttctagtctgttccacagttcagtgatgtgttctatggcatctcgatccagcagacctcctcgtttcgcgggtttggacggctcctggaatagggtatgagacgatgggcgtccagcgctgccagggttcggtccttccagggtctcagtgttcgagtcagggttgtttccgtcacagtgaaggggtgtgcgcctgcttgggcgcttgccagggtgcgcttcagactcatcctgctggtcgaaaacttctgtcgcttggcgccctgtatgtcggccaagtagcagtttaccatgagttcgtagttgagcgcctcggctgcgtggcctttggcgcggagcttacctttggaagttttcttgcataccgggcagtataggcatttcagcgcatacaacttgggcgcaaggaaaacggattctggggagtatgcatctgcgccgcaggaggcgcaaacagtttcacattccaccagccaggttaaatccggttcattggggtcaaaaacaagttttccgccatattttttgatgcgtttcttacctttggtctccatgagttcgtgtcctcgttgagtgacaaacaggctgtccgtgtccccgtagactgattttacaggcctcttctccagtggagtgcctcggtcttcttcgtacaggaactctgaccactctgatacaaaggcgcgcgtccaggccagcacaaaggaggctatgtgggaggggtagcgatcgttgtcaaccagggggtccaccttttccaaagtatgcaaacacatgtcaccctcttcaacatccaggaatgtgattggcttgtaggtgtatttcacgtgacctggggtccccgctgggggggtataaaagggggcggttctttgctcttcctcactgtcttccggatcgctgtccaggaacgtcagctgttggggtaggtattccctctcgaaggcgggcatgacctctgcactcaggttgtcagtttctaagaacgaggaggatttgatattgacagtgccggttgagatgcctttcatgaggttttcgtccatctggtcagaaaacacaatttttttattgtcaagtttggtggcaaatgatccatacagggcgttggataaaagtttggcaatggatcgcatggtttggttcttttccttgtccgcgcgctctttggcggcgatgttgagttggacatactcgcgtgccaggcacttccattcggggaagatagttgttaattcatctggcacgattctcacttgccaccctcgattatgcaaggtaattaaatccacactggtggccacctcgcctcgaaggggttcattggtccaacagagcctacctcctttcctagaacagaaagggggaagtgggtctagcataagttcatcgggagggtctgcatccatggtaaagattcccggaagtaaatccttatcaaaatagctgatgggagtggggtcatctaaggccatttgccattctcgagctgccagtgcgcgctcatatgggttaaggggactgccccatggcatgggatgggtgagtgcagaggcatacatgccacagatgtcatagacgtagatgggatcctcaaagatgcctatgtaggttggatagcatcgcccccctctgatacttgctcgcacatagtcatatagttcatgtgatggcgctagcagccccggacccaagttggtgcgattgggtttttctgttctgtagacgatctggcgaaagatggcgtgagaattggaagagatggtgggtctttgaaaaatgttgaaatgggcatgaggtagacctacagagtctctgacaaagtgggcataagattcttgaagcttggttaccagttcggcggtgacaagtacgtctagggcgcagtagtcaagtgtttcttgaatgatgtcataacctggttggtttttcttttcccacagttcgcggttgagaaggtattcttcgcgatccttccagtactcttctagcggaaacccgtctttgtctgcacggtaagatcctagcatgtagaactgattaactgccttgtaagggcagcagcccttctctacgggtagagagtatgcttgagcagcttttcgtagcgaagcgtgagtaagggcaaaggtgtctctgaccatgactttgaggaattggtatttgaagtcgatgtcgtcacaggctccctgttcccagagttggaagtctacccgtttcttgtaggcggggttgggcaaagcgaaagtaacatcattgaagagaatcttgccggccctgggcatgaaattgcgagtgatgcgaaaaggctgtggtacttccgctcggttattgataacctgggcagctaggacgatctcgtcgaaaccgttgatgttgtgtcctacgatgtataattctatgaaacgcggcgtgcctctgacgtgaggtagcttactgagctcatcaaaggttaggtctgtggggtcagataaggcgtagtgttcgagagcccattcgtgcaggtgaggattcgctttaaggaaggaggaccagaggtccactgccagtgctgtttgtaactggtcccggtactgacgaaaatgccgtccgactgccattttttctggggtgacgcaatagaaggtttgggggtcctgccgccagcgatcccacttgagttttatggcgaggtcataggcgatgttgacgagccgctggtctccagagagtttcatgaccagcatgaaggggattagctgcttgccaaaggaccccatccaggtgtaggtttccacatcgtaggtgagaaagagcctttctgtgcgaggatgagagccaatcgggaagaactggatctcctgccaccagttggaggaatggctgttgatgtgatggaagtagaactccctgcgacgcgccgagcattcatgcttgtgcttgtacagacggccgcagtagtcgcagcgttgcacgggttgtatctcgtgaatgagttgtacctggcttcccttgacgagaaatttcagtgggaagccgaggcctggcgattgtatctcgtgctttactatgttgtctgcatcggcctgttcatcttctgtctcgatggtggtcatgctgacgagccctcgcgggaggcaagtccagacctcggcgcggcaggggcggagctcgaggacgagagcgcgcaggctggagctgtccagggtcctgagacgctgcggactcaggttagtaggcagtgtcaggagattaacttgcatgatcttttggagggcgtgcgggaggttcagatagtacttgatctcaacgggtccgttggtggagatgtcgatggcttgcagggttccgtgtcccttgggcgctaccaccgtgcccttgtttttcattttggacggcggtggctctgttgcttcttgcatgtttagaagcggtgtcgagggcgcgcaccgggcggcaggggcggctcgggacccggcggcatggctggcagtggtacgtcggcgccgcgcgcgggtaggttctggtactgcgccctgagaagactcgcatgcgcgacgacgcggcggttgacatcctggatctgacgcctctgggtgaaagctaccggccccgtgagcttgaacctgaaagagagttcaacagaatcaatctcggtatcgttgacggcggcttgcctaaggatttcttgcacgtcaccagagttgtcctggtaggcgatctccgccatgaactgctcgatctcttcctcttgaagatctccgcggcccgctctctcgacggtggccgcgaggtcgttggagatgcgcccaatgagttgagagaatgcattcatgcccgcctcgttccagacgcggctgtagaccacggcccccacgggatctctcgcgcgcatgaccacctgggcgaggttgagctccacgtggcgggtgaagaccgcatagttgcataggcgctggaaaaggtagttgagtgtggtggcgatgtgctcggtgacgaagaaatacatgatccatcgtctcagcggcatctcgctgacatcgcccagagcttccaagcgctccatggcctcgtagaagtccacggcaaaattaaaaaactgggagtttcgcgcggacacggtcaactcctcttccagaagacggataagttcggcgatggtggtgcgcacctcgcgctcgaaagcccctgggatttcttcctcaatctcttcttcttccactaacatctcttcctcttcaggtggggctgcaggaggagggggaacgcggcgacgccggcggcgcacgggcagacggtcgatgaatctttcaatgacctctccgcggcggcggcgcatggtttcagtgacggcgcggccgttctcgcgcggtcgcagagtaaaaacaccgccgcgcatctccttaaagtggtgactgggaggttctccgtttgggagggagagggcgctgattatacattttattaattggcccgtagggactgcacgcagagatctgatcgtgtcaagatccacgggatctgaaaacctttcgacgaaagcgtctaaccagtcacagtcacaaggtaggctgagtacggcttcttgtgggcgggggtggttatgtgttcggtctgggtcttctgtttcttcttcatctcgggaaggtgagacgatgctgctggtgatgaaattaaagtaggcagttctaagacggcggatggtggcgaggagcaccaggtctttgggtccggcttgctggatacgcaggcgattggccattccccaagcattatcctgacatctagcaagatctttgtagtagtcttgcatgagccgttctacgggcacttcttcctcacccgttctgccatgcatacgtgtgagtccaaatccgcgcattggttgtaccagtgccaagtcagctacgactctttcggcgaggatggcttgctgtacttgggtaagggtggcttgaaagtcatcaaaatccacaaagcggtggtaagctcctgtattaatggtgtaagcacagttggccatgactgaccagttaactgtctggtgaccagggcgcacgagctcggtgtatttaaggcgcgaataggcgcgggtgtcaaagatgtaatcgttgcaggtgcgcaccagatactggtaccctataagaaaatgcggcggtggttggcggtagagaggccatcgttctgtagctggagcgccaggggcgaggtcttccaacataaggcggtgatagccgtagatgtacctggacatccaggtgattcctgcggcggtagtagaagcccgaggaaactcgcgtacgcggttccaaatgttgcgtagcggcatgaagtagttcattgtaggcacggtttgaccagtgaggcgcgcgcagtcattgatgctctatagacacggagaaaatgaaagcgttcagcgactcgactccgtagcctggaggaacgtgaacgggttgggtcgcggtgtaccccggttcgagacttgtactcgagccggccggagccgcggctaacgtggtattggcactcccgtctcgacccagcctacaaaaatccaggatacggaatcgagtcgttttgctggtttccgaatggcagggaagtgagtcctattttttttttttgccgctcagatgcatcccgtgctgcgacagatgcgcccccaacaacagcccccctcgcagcagcagcagcagcaatcacaaaaggctgtccctgcaactactgcaactgccgccgtgagcggtgcgggacagcccgcctatgatctggacttggaagagggcgaaggactggcacgtctaggtgcgccttcacccgagcggcatccgcgagttcaactgaaaaaagattctcgcgaggcgtatgtgccccaacagaacctatttagagacagaagcggcgaggagccggaggagatgcgagcttcccgctttaacgcgggtcgtgagctgcgtcacggtttggaccgaagacgagtgttgcgggacgaggatttcgaagttgatgaaatgacagggatcagtcctgccagggcacacgtggctgcagccaaccttgtatcggcttacgagcagacagtaaaggaagagcgtaacttccaaaagtcttttaataatcatgtgcgaaccctgattgcccgcgaagaagttacccttggtttgatgcatttgtgggatttgatggaagctatcattcagaaccctactagcaaacctctgaccgcccagctgtttctggtggtgcaacacagcagagacaatgaggctttcagagaggcgctgctgaacatcaccgaacccgaggggagatggttgtatgatcttatcaacattctacagagtatcatagtgcaggagcggagcctgggcctggccgagaaggtggctgccatcaattactcggttttgagcttgggaaaatattacgctcgcaaaatctacaagactccatacgttcccatagacaaggaggtgaagatagatgggttctacatgcgcatgacgctcaaggtcttgaccctgagcgatgatcttggggtgtatcgcaatgacagaatgcatcgcgcggttagcgccagcaggaggcgcgagttaagcgacagggaactgatgcacagtttgcaaagagctctgactggagctggaaccgagggtgagaattacttcgacatgggagctgacttgcagtggcagcctagtcgcagggctctgagcgccgcgacggcaggatgtgagcttccttacatagaagaggcggatgaaggcgaggaggaagagggcgagtacttggaagactgatggcacaacccgtgttttttgctagatggaacagcaagcaccggatcccgcaatgcgggcggcgctgcagagccagccgtccggcattaactcctcggacgattggacccaggccatgcaacgtatcatggcgttgacgactcgcaaccccgaagcctttagacagcaaccccaggccaaccgtctatcggccatcatggaagctgtagtgccttcccgctctaatcccactcatgagaaggtcctggccatcgtgaacgcgttggtggagaacaaagctattcgtccagatgaggccggactggtatacaacgctctcttagaacgcgtggctcgctacaacagtagcaatgtgcaaaccaatttggaccgtatgataacagatgtacgcgaagccgtgtctcagcgcgaaaggttccagcgtgatgccaacctgggttcgctggtggcgttaaatgctttcttgagtactcagcctgctaatgtgccgcgtggtcaacaggattatactaactttttaagtgctttgagactgatggtatcagaagtacctcagagcgaagtgtatcagtccggtcctgattacttctttcagactagcagacagggcttgcagacggtaaatctgagccaagcttttaaaaaccttaaaggtttgtggggagtgcatgccccggtaggagaaagagcaaccgtgtctagcttgttaactccgaactcccgcctattattactgttggtagctcctttcaccgacagcggtagcatcgaccgtaattcctatttgggttacctactaaacctgtatcgcgaagccatagggcaaagtcaggtggacgagcagacctatcaagaaattacccaagtcagtcgcgctttgggacaggaagacactggcagtttggaagccactctgaacttcttgcttaccaatcggtctcaaaagatccctcctcaatatgctcttactgcggaggaggagaggatccttagatatgtgcagcagagcgtgggattgtttctgatgcaagagggggcaactccgactgcagcactggacatgacagcgcgaaatatggagcccagcatgtatgccagtaaccgacctttcattaacaaactgctggactacttgcacagagctgccgctatgaactctgattatttcaccaatgccatcttaaacccgcactggctgcccccacctggtttctacacgggcgaatatgacatgcccgaccctaatgacggatttctgtgggacgacgtggacagcgatgttttttcacctctttctgatcatcgcacgtggaaaaaggaaggcggcgatagaatgcattcttctgcatcgctgtccggggtcatgggtgctaccgcggctgagcccgagtctgcaagtccttttcctagtctacccttttctctacacagtgtacgtagcagcgaagtgggtagaataagtcgcccgagtttaatgggcgaagaggagtatctaaacgattccttgctcagaccggcaagagaaaaaaatttcccaaacaatggaatagaaagtttggtggataaaatgagtagatggaagacttatgctcaggatcacagagacgagcctgggatcatggggattacaagtagagcgagccgtagacgccagcgccatgacagacagaggggtcttgtgtgggacgatgaggattcggccgatgatagcagcgtgctggacttgggtgggagaggaaggggcaacccgtttgctcatttgcgccctcgcttgggtggtatgttgtaaaaaaaaataaaaaaaaaactcaccaaggccatggcgacgagcgtacgttcgttcttctttattatctgtgtctagtataatgaggcgagtcgtgctaggcggagcggtggtgtatccggagggtcctcctccttcgtacgagagcgtgatgcagcagcagcaggcgacggcggtgatgcaatccccactggaggctccctttgtgcctccgcgatacctggcacctacggagggcagaaacagcattcgttattcggaactggcacctcagtacgataccaccaggttgtatctggtggacaacaagtcggcggacattgcttctctgaactatcagaatgaccacagcaacttcttgaccacggtggtgcaaaacaatgactttacccctacggaagccagcacccagaccattaactttgatgaacgatcgcggtggggcggtcagctaaagaccatcatgcatactaacatgccaaacgtgaacgagtatatgtttagtaacaagttcaaagcgcgtgtgatggtgtccagaaaacctcccgacggtgctgcagttggggatacttatgatcacaagcaggatattttgaaatatgagtggttcgagtttactttgccagaaggcaacttttcagttactatgactattgatttgatgaacaatgccatcatagataattacttgaaagtgggtagacagaatggagtgcttgaaagtgacattggtgttaagttcgacaccaggaacttcaagctgggatgggatcccgaaaccaagttgatcatgcctggagtgtatacgtatgaagccttccatcctgacattgtcttactgcctggctgcggagtggattttaccgagagtcgtttgagcaaccttcttggtatcagaaaaaaacagccatttcaagagggttttaagattttgtatgaagatttagaaggtggtaatattccggccctcttggatgtagatgcctatgagaacagtaagaaagaacaaaaagccaaaatagaagctgctacagctgctgcagaagctaaggcaaacatagttgccagcgactctacaagggttgctaacgctggagaggtcagaggagacaattttgcgccaacacctgttccgactgcagaatcattattggccgatgtgtctgaaggaacggacgtgaaactcactattcaacctgtagaaaaagatagtaagaatagaagctataatgtgttggaagacaaaatcaacacagcctatcgcagttggtatctttcgtacaattatggcgatcccgaaaaaggagtgcgttcctggacattgctcaccacctcagatgtcacctgcggagcagagcaggtctactggtcgcttccagacatgatgaaggatcctgtcactttccgctccactagacaagtcagtaactaccctgtggtgggtgcagagcttatgcccgtcttctcaaagagcttctacaacgaacaagctgtgtactcccagcagctccgccagtccacctcgcttacgcacgtcttcaaccgctttcctgagaaccagattttaatccgtccgccggcgcccaccattaccaccgtcagtgaaaacgttcctgctctcacagatcacgggaccctgccgttgcgcagcagtatccggggagtccaacgtgtgaccgttactgacgccagacgccgcacctgtccctacgtgtacaaggcactgggcatagtcgcaccgcgcgtcctttcaagccgcactttctaaaaaaaaaaaaaatgtccattcttatctcgcccagtaataacaccggttggggtctgcgcgctccaagcaagatgtacggaggcgcacgcaaacgttctacccaacatcctgtccgtgttcgcggacattttcgcgctccatggggcgccctcaagggccgcactcgcgttcgaaccaccgtcgatgatgtaatcgatcaggtggttgccgacgcccgtaattatactcctactgcgcctacatctactgtggatgcagttattgacagtgtagtggctgacgctcgcaactatgctcgacgtaagagccggcgaaggcgcattgccagacgccaccgagctaccactgccatgcgagccgcaagagctctgctacgaagagctagacgcgtggggcgaagagccatgcttagggcggccagacgtgcagcttcgggcgccagcgccggcaggtcccgcaggcaagcagccgctgtcgcagcggcgactattgccgacatggcccaatcgcgaagaggcaatgtatactgggtgcgtgacgctgccaccggtcaacgtgtacccgtgcgcacccgtccccctcgcacttagaagatactgagcagtctccgatgttgtgtcccagcggcgaggatgtccaagcgcaaatacaaggaagaaatgctgcaggttatcgcacctgaagtctacggccaaccgttgaaggatgaaaaaaaaccccgcaaaatcaagcgggttaaaaaggacaaaaaagaagaggaagatggcgatgatgggctggcggagtttgtgcgcgagtttgccccacggcgacgcgtgcaatggcgtgggcgcaaagttcgacatgtgttgagacctggaacttcggtggtctttacacccggcgagcgttcaagcgctacttttaagcgttcctatgatgaggtgtacggggatgatgatattcttgagcaggcggctgaccgattaggcgagtttgcttatggcaagcgtagtagaataacttccaaggatgagacagtgtcgatacccttggatcatggaaatcccacccctagtcttaaaccggtcactttgcagcaagtgttacccgtaactccgcgaacaggtgttaaacgcgaaggtgaagatttgtatcccactatgcaactgatggtacccaaacgccagaagttggaggacgttttggagaaagtaaaagtggatccagatattcaacctgaggttaaagtgagacccattaagcaggtagcgcctggtctgggggtacaaactgtagacattaagattcccactgaaagtatggaagtgcaaactgaacccgcaaagcctactgccacctccactgaagtgcaaacggatccatggatgcccatgcctattacaactgacgccgccggtcccactcgaagatcccgacgaaagtacggtccagcaagtctgttgatgcccaattatgttgtacacccatctattattcctactcctggttaccgaggcactcgctactatcgcagccgaaacagtacctcccgccgtcgccgcaagacacctgcaaatcgcagtcgtcgccgtagacgcacaagcaaaccgactcccggcgccctggtgcggcaagtgtaccgcaatggtagtgcggaacctttgacactgccgcgtgcgcgttaccatccgagtatcatcacttaatcaatgttgccgctgcctccttgcagatatggccctcacttgtcgccttcgcgttcccatcactggttaccgaggaagaaactcgcgccgtagaagagggatgttgggacgcggaatgcgacgctacaggcgacggcgtgctatccgcaagcaattgcggggtggttttttaccagccttaattccaattatcgctgctgcaattggcgcgataccaggcatagcttccgtggcggttcaggcctcgcaacgacattgacattggaaaaaaacgtataaataaaaaaaaaaaaatacaatggactctgacactcctggtcctgtgactatgttttcttagagatggaagacatcaatttttcatccttggctccgcgacacggcacgaagccgtacatgggcacctggagcgacatcggcacgagccaactgaacgggggcgccttcaattggagcagtatctggagcgggcttaaaaattttggctcaaccataaaaacatacgggaacaaagcttggaacagcagtacaggacaggcgcttagaaataaacttaaagaccagaacttccaacaaaaagtagtcgatgggatagcttccggcatcaatggagtggtagatttggctaaccaggctgtgcagaaaaagataaacagtcgtttggacccgccgccagcaaccccaggtgaaatgcaagtggaggaagaaattcctccgccagaaaaacgaggcgacaagcgtccgcgtcccgatttggaagagacgctggtgacgcgcgtagatgaaccgccttcttatgaggaagcaacgaagcttggaatgcccaccactagaccgatagccccaatggccaccggggtgatgaaaccttctcagttgcatcgacccgtcaccttggatttgccccctccccctgctgctactgctgtacccgcttctaagcctgtcgctgccccgaaaccagtcgccgtagccaggtcacgtcccgggggcgctcctcgtccaaatgcgcactggcaaaatactctgaacagcatcgtgggtctaggcgtgcaaagtgtaaaacgccgtcgctgcttttaattaaatatggagtagcgcttaacttgcctatctgtgtatatgtgtcattacacgccgtcacagcagcagaggaaaaaaggaagaggtcgtgcgtcgacgctgagttactttcaagatggccaccccatcgatgctgccccaatgggcatacatgcacatcgccggacaggatgcttcggagtacctgagtccgggtctggtgcagttcgcccgcgccacagacacctacttcaatctgggaaataagtttagaaatcccaccgtagcgccgacccacgatgtgaccaccgaccgtagccagcggctcatgttgcgcttcgtgcccgttgaccgggaggacaatacatactcttacaaagtgcggtacaccctggccgtgggcgacaacagagtgctggatatggccagcacgttctttgacattaggggtgtgttggacagaggtcccagtttcaaaccctattctggtacggcttacaactccctggctcctaaaggcgctccaaatacatctcagtggattgcagaaggtgtaaaaaatacaactggtgaggaacacgtaacagaagaggaaaccaatactactacttacacttttggcaatgctcctgtaaaagctgaagctgaaattacaaaagaaggactcccagtaggtttggaagtttcagatgaagaaagtaaaccgatttatgctgataaaacatatcagccagaacctcagctgggagatgaaacttggactgaccttgatggaaaaaccgaaaagtatggaggcagggctctcaaacccgatactaagatgaaaccatgctacgggtcctttgccaaacctactaatgtgaaaggcggtcaggcaaaacaaaaaacaacggagcagccaaatcagaaagtcgaatatgatatcgacatggagttttttgatgcggcatcgcagaaaacaaacttaagtcctaaaattgtcatgtatgcagaaaatgtaaatttggaaactccagacactcatgtagtgtacaaacctggaacagaagacacaagttccgaagctaatttgggacaacaatctatgcccaacagacccaactacattggcttcagagataactttattggacttatgtactataacagtactggtaacatgggggtgctggctggtcaagcgtctcagttaaatgcagtggttgacttgcaggacagaaacacagaactttcttaccaactcttgcttgactctctgggcgacagaaccagatactttagcatgtggaatcaggctgtggacagttatgatcctgatgtacgtgttattgaaaatcatggtgtggaagatgaacttcccaactactgttttccactggacggcataggtgttccaacaaccagttacaaatcaatagttccaaatggagacaatgcgcctaattggaaggaacctgaagtaaatggaacaagtgagatcggacagggtaatttgtttgccatggaaattaaccttcaagccaatctatggcgaagtttcctttattccaatgtggctctatatctcccagactcgtacaaatacaccccgtccaatgtcactcttccagaaaacaaaaacacctacgactacatgaacgggcgggtggtgccgccatctctagtagacacctatgtgaacattggtgccaggtggtctctggatgccatggacaatgtcaacccattcaaccaccaccgtaacgctggcttgcgttaccgatccatgcttctgggtaacggacgttatgtgcctttccacatacaagtgcctcaaaaattcttcgctgttaaaaacctgctgcttctcccaggctcctacacttatgagtggaactttaggaaggatgtgaacatggttctacagagttccctcggtaacgacctgcgggtagatggcgccagcatcagtttcacgagcatcaacctctatgctacttttttccccatggctcacaacaccgcttccacccttgaagccatgctgcggaatgacaccaatgatcagtcattcaacgactacctatctgcagctaacatgctctaccccattcctgccaatgcaaccaatattcccatttccattccttctcgcaactgggcggctttcagaggctggtcatttaccagactgaaaaccaaagaaactccctctttggggtctggatttgacccctactttgtctattctggttctattccctacctggatggtaccttctacctgaaccacacttttaagaaggtttccatcatgtttgactcttcagtgagctggcctggaaatgacaggttactatctcctaacgaatttgaaataaagcgcactgtggatggcgaaggctacaacgtagcccaatgcaacatgaccaaagactggttcttggtacagatgctcgccaactacaacatcggctatcagggcttctacattccagaaggatacaaagatcgcatgtattcatttttcagaaacttccagcccatgagcaggcaggtggttgatgaggtcaattacaaagacttcaaggccgtcgccataccctaccaacacaacaactctggctttgtgggttacatggctccgaccatgcgccaaggtcaaccctatcccgctaactatccctatccactcattggaacaactgccgtaaatagtgttacgcagaaaaagttcttgtgtgacagaaccatgtggcgcataccgttctcgagcaacttcatgtctatgggggcccttacagacttgggacagaatatgctctatgccaactcagctcatgctctggacatgacctttgaggtggatcccatggatgagcccaccctgctttatcttctcttcgaagttttcgacgtggtcagagtgcatcagccacaccgcggcatcatcgaggcagtctacctgcgtacaccgttctcggccggtaacgctaccacgtaagaagcttcttgcttcttgcaaatagcagctgcaaccatggcctgcggatcccaaaacggctccagcgagcaagagctcagagccattgtccaagacctgggttgcggaccctattttttgggaacctacgataagcgcttcccggggttcatggcccccgataagctcgcctgtgccattgtaaatacggccggacgtgagacggggggagagcactggttggctttcggttggaacccacgttctaacacctgctacctttttgatccttttggattctcggatgatcgtctcaaacagatttaccagtttgaatatgagggtctcctgcgccgcagcgctcttgctaccaaggaccgctgtattacgctggaaaaatctacccagaccgtgcagggtccccgttctgccgcctgcggacttttctgctgcatgttccttcacgcctttgtgcactggcctgaccgtcccatggacggaaaccccaccatgaaattgctaactggagtgccaaacaacatgcttcattctcctaaagtccagcccaccctgtgtgacaatcaaaaagcactctaccattttcttaatacccattcgccttattttcgctcccatcgtacacacatcgaaagggccactgcgttcgaccgtatggatgttcaataatgactcatgtaaacaacgtgttcaataaacatcactttatttttttacatgtatcaaggctctgcattacttatttatttacaagtcgaatgggttctgacgagaatcagaatgacccgcaggcagtgatacgttgcggaactgatacttgggttgccacttgaattcgggaatcaccaacttgggaaccggtatatcgggcaggatgtcactccacagctttctggtcagctgcaaagctccaagcaggtcaggagccgaaatcttgaaatcacaattaggaccagtgctttgagcgcgagagttgcggtacaccggattgcagcactgaaacaccatcagcgacggatgtctcacgcttgccagcacggtgggatctgcaatcatgcccacatccagatcttcagcattggcaatgctgaacggggtcatcttgcaggtctgcctacccatggcgggcacccaattaggcttgtggttgcaatcgcagtgcagggggatcagtatcatcttggcctgatcctgtctgattcctggatacacggctctcatgaaagcatcatattgcttgaaagcctgctgggctttactaccctcggtataaaacatcccgcaggacctgctcgaaaactggttagctgcacagccggcatcattcacacagcagcgggcgtcattgttagctatttgcaccacacttctgccccagcggttttgggtgattttggttcgctcgggattctcctttaaggctcgttgtccgttctcgctggccacatccatctcgataatctgctccttctgaatcataatattgccatgcaggcacttcagcttgccctcataatcattgcagccatgaggccacaacgcacagcctgtacattcccaattatggtgggcgatctgagaaaaagaatgtatcattccctgcagaaatcttcccatcatcgtgctcagtgtcttgtgactagtgaaagttaactggatgcctcggtgctcctcgtttacgtactggtgacagatgcgcttgtattgttcgtgttgctcaggcattagtttaaaagaggttctaagttcgttatccagcctgtacttctccatcagcagacacatcacttccatgcctttctcccaagcagacaccaggggcaagctaatcggattcttaacagtgcaggcagcagctcctttagccagagggtcatctttagcgatcttctcaatgcttcttttgccatccttctcaacgatgcgcacgggcgggtagctgaaacccactgctacaagttgcgcctcttctctttcttcttcgctgtcttgactgatgtcttgcatggggatatgtttggtcttccttggcttctttttggggggtatcggaggaggaggactgtcgctccgttccggagacagggaggattgtgacgtttcgctcaccattaccaactgactgtcggtagaagaacctgaccccacacggcgacaggtgtttctcttcgggggcagaggtggaggcgattgcgaagggctgcggtccgacctggaaggcggatgactggcagaaccccttccgcgttcgggggtgtgctccctgtggcggtcgcttaactgatttccttcgcggctggccattgtgttctcctaggcagagaaacaacagacatggaaactcagccattgctgtcaacatcgccacgagtgccatcacatctcgtcctcagcgacgaggaaaaggagcagagcttaagcattccaccgcccagtcctgccaccacctctaccctagaagataaggaggtcgacgcatctcatgacatgcagaataaaaaagcgaaagagtctgagacagacatcgagcaagacccgggctatgtgacaccggtggaacacgaggaagagttgaaacgctttctagagagagaggatgaaaactgcccaaaacaacgagcagataactatcaccaagatgctggaaatagggatcagaacaccgactacctcatagggcttgacggggaagacgcgctccttaaacatctagcaagacagtcgctcatagtcaaggatgcattattggacagaactgaagtgcccatcagtgtggaagagctcagccgcgcctacgagcttaacctcttttcacctcgtactccccccaaacgtcagccaaacggcacctgcgagccaaatcctcgcttaaacttttatccagcttttgctgtgccagaagtactggctacctatcacatcttttttaaaaatcaaaaaattccagtctcctgccgcgctaatcgcacccgcgccgatgccctactcaatctgggacctggttcacgcttacctgatatagcttccttggaagaggttccaaagatcttcgagggtctgggcaataatgagactcgggccgcaaatgctctgcaaaagggagaaaatggcatggatgagcatcacagcgttctggtggaattggaaggcgataatgccagactcgcagtactcaagcgaagcatcgaggtcacacacttcgcatatcccgctgtcaacctgccccctaaagtcatgacggcggtcatggaccagttactcattaagcgcgcaagtcccctttcagaagacatgcatgacccagatgcctgtgatgagggtaaaccagtggtcagtgatgagcagctaacccgatggctgggcaccgactctcccagggatttggaagagcgtcgcaagcttatgatggccgtggtgctggttaccgtagaactagagtgtctccgacgtttctttaccgattcagaaaccttgcgcaaactcgaagagaatctgcactacacttttagacacggctttgtgcggcaggcatgcaagatatctaacgtggaactcaccaacctggtttcctacatgggtattctgcatgagaatcgcctaggacaaagcgtgctgcacagcaccctgaagggggaagcccgccgtgattacatccgcgattgtgtctatctgtacctgtgccacacgtggcaaaccggcatgggtgtatggcagcaatgtttagaagaacagaacttgaaagagcttgacaagctcttacagaaatctcttaaggttctgtggacagggttcgacgagcgcaccgtcgcttccgacctggcagacctcatcttcccagagcgtctcagggttactttgcgaaacggattgcctgactttatgagccagagcatgcttaacaattttcgctctttcatcctggaacgctccggtatcctgcccgccacctgctgcgcactgccctccgactttgtgcctctcacctaccgcgagtgccccccgccgctatggagtcactgctacctgttccgtctggccaactatctctcctaccactcggatgtgatcgaggatgtgagcggagacggcttgctggagtgtcactgccgctgcaatctgtgcacgccccaccggtccctagcttgcaacccccagttgatgagcgaaacccagataataggcacctttgaattgcaaggccccagcagccaaggcgatgggtcttctcctgggcaaagtttaaaactgaccccgggactgtggacctccgcctacttgcgcaagtttgctccggaagattaccacccctatgaaatcaagttctatgaggaccaatcacagcctccaaaggccgaactttcggcctgcgtcatcacccagggggcaattctggcccaattgcaagccatccaaaaatcccgccaagaatttctactgaaaaagggtaagggggtctaccttgacccccagaccggcgaggaactcaacacaaggttccctcaggatgtcccaacgacgagaaaacaagaagttgaaggtgcagccgccgcccccagaagatatggaggaagattgggacagtcaggcagaggaggcggaggaggacagtctggaggacagtctggaggaagacagtttggaggaggaaaacgaggaggcagaggaggtggaagaagtaaccgccgacaaacagttatcctcggctgcggagacaagcaacagcgctaccatctccgctccgagtcgaggaacccggcggcgtcccagcagtagatgggacgagaccggacgcttcccgaacccaaccagcgcttccaagaccggtaagaaggatcggcagggatacaagtcctggcgggggcataagaatgccatcatctcctgcttgcatgagtgcgggggcaacatatccttcacgcggcgctacttgctattccaccatggggtgaactttccgcgcaatgttttgcattactaccgtcacctccacagcccctactatagccagcaaatcccggcagtctcgacagataaagacagcggcggcgacctccaacagaaaaccagcagcggcagttagaaaatacacaacaagtgcagcaacaggaggattaaagattacagccaacgagccagcgcaaacccgagagttaagaaatcggatctttccaaccctgtatgccatcttccagcagagtcggggtcaagagcaggaactgaaaataaaaaaccgatctctgcgttcgctcaccagaagttgtttgtatcacaagagcgaagatcaacttcagcgcactctcgaggacgccgaggctctcttcaacaagtactgcgcgctgactcttaaagagtaggcagcgaccgcgcttattcaaaaaaggcgggaattacatcatcctcgacatgagtaaagaaattcccacgccttacatgtggagttatcaaccccaaatgggattggcggcaggcgcctcccaggactactccacccgcatgaattggctcagcgccgggccttctatgatttctcgagttaatgatatacgcgcctaccgaaaccaaatacttttggaacagtcagctcttaccaccacgccccgccaacaccttaatcccagaaattggcccgccgccctagtgtaccaggaaagtcccgctcccaccactgtattacttcctcgagacgcccaggccgaagtccaaatgactaatgcaggtgcgcagttagctggcggctccaccctatgtcgtcacaggcctcggcataatataaaacgcctgatgatcagaggccgaggtatccagctcaacgacgagtcggtgagctctccgcttggtctacgaccagacggaatctttcagattgccggctgcgggagatcttccttcacccctcgtcaggctgttctgactttggaaagttcgtcttcgcaaccccgctcgggcggaatcgggaccgttcaatttgtggaggagtttactccctctgtctacttcaaccccttctccggatctcctgggcattacccggacgagttcataccgaacttcgacgcgattagcgagtcagtggacggctacgattgatgtctggtgacgcggctgagctatctcggctgcgacatctagaccactgccgccgctttcgctgctttgcccgggaactcattgagttcatctacttcgaactccccaaggatcaccctcaaggtccggcccacggagtgcggatttctatcgaaggcaaaatagactctcgcctgcaacgaattttctcccagcggcccgtgctgatcgagcgagaccagggaaacaccacggtttccatctactgcatttgtaatcaccccggattgcatgaaagcctttgctgtcttatgtgtactgagtttaataaaaactgaattaagactctcctacggactgccgcttcttcaacccggattttacaaccagaagaacgaaacttttcctgtcgtccaggactctgttaacttcacctttcctactcacaaactagaagctcaacgactacaccgcttttccagaagcattttccctactaatactactttcaaaaccggaggtgagctccaaggtcttcctacagaaaacccttgggtggaagcgggccttgtagtgctaggaattcttgcgggtgggcttgtgattattctttgctacctatacacaccttgcttcactttcttagtggtgttgtggtattggtttaaaaaatggggcccatactagtcttgcttgttttactttcgcttttggaaccgggttctgccaattacgatccatgtctagacttcgacccagaaaactgcacacttacttttgcacccgacacaagccgcatctgtggagttcatcgcctctcttacgaacttggcccccaacgacaaaaatttacctgcatggtgggaatcaaccccatagttatcacccagcaaagtggagatactaagggttgcattcactgctcctgcgattccatcgagtgcacctacaccctgctgaagaccctatgcggcctaagagacctgctaccaatgaattaaaaaatgattaataaaaaatcacttacttgaaatcagcaataaggtctctgttgaaattttctcccagcagcacctcacttccctcttcccaactctggtattctaaaccccgttcagcggcatactttctccatactttaaaggggatgtcaaattttagctcctctcctgtacccacaatcttcatgtctttcttcccagatgaccaagagagtccggctcagtgactccttcaaccctgtctacccctatgaagatgaaagcacctcccaacacccctttataaacccagggtttatttccccaaatggcttcacacaaagcccaaacggagttcttactttaaaatgtttaaccccactaacaaccacaggcggatctctacagctaaaagtgggagggggacttacagtggatgacaccaacggttttttgaaagaaaacataagtgccaccacaccactcgttaagactggtcactctataggtttaccactaggagccggattgggaacgaatgaaaataaactttgtatcaaattaggacaaggacttacattcaattcaaacaacatttgcattgatgacaatattaacaccttatggacaggagtcaaccccaccgaagccaactgtcaaatcatgaactccagtgaatctaatgattgcaaattaattctaacactagttaaaactggagcactagtcactgcatttgtttatgttataggagtatctaacaattttaatatgctaactacacacagaaatataaattttactgcagagctgtttttcgattctactggtaatttactaactagactctcatccctcaaaactccacttaatcataaatcaggacaaaacatggctactggtgccattactaatgctaaaggtttcatgcccagcacgactgcctatcctttcaatgataattctagagaaaaagaaaactacatttacggaacttgttactacacagctagtgatcgcactgcttttcccattgacatatctgtcatgcttaaccgaagagcaataaatgacgagacatcatattgtattcgtataacttggtcctggaacacaggagatgccccagaggtgcaaacctctgctacaaccctagtcacctccccatttaccttttactacatcagagaagacgactgacaaataaagtttgcgatcgccaggcccaccatgtgtcaccagcagttggtcatctcttggttttccctggtttttctggcatctcccctcgtggccatatgggaactgaagaaagatgtttatgtcgtagaattggattggtatccggatgcccctggagaaatggtggtcctcacctgtgacacccctgaagaagatggtatcacctggaccttggaccagagcagtgaggtcttaggctctggcaaaaccctgaccatccaagtcaaagagtttggagatgctggccagtacacctgtcacaaaggaggcgaggttctaagccattcgctcctgctgcttcacaaaaaggaagatggaatttggtccactgatattttaaaggaccagaaagaacccaaaaataagacctttctaagatgcgaggccaagaattattctggacgtttcacctgctggtggctgacgacaatcagtactgatttgacattcagtgtcaaaagcagcagaggctcttctgacccccaaggggtgacgtgcggagctgctacactctctgcagagagagtcagaggggacaacaaggagtatgagtactcagtggagtgccaggaggacagtgcctgcccagctgctgaggagagtctgcccattgaggtcatggtggatgccgttcacaagctcaagtatgaaaactacaccagcagcttcttcatcagggacatcatcaaacctgacccacccaagaacttgcagctgaagccattaaagaattctcggcaggtggaggtcagctgggagtaccctgacacctggagtactccacattcctacttctccctgacattctgcgttcaggtccagggcaagagcaagagagaaaagaaagatagagtcttcacggacaagacctcagccacggtcatctgccgcaaaaatgccagcattagcgtgcgggcccaggaccgctactatagctcatcttggagcgaatgggcatctgtgccctgcagtggagggggcggcagcgggggaggcggcagcggcggcgggggatcgagaaacctccccgtggccactccagacccaggaatgttcccatgccttcaccactcccaaaacctgctgagggccgtcagcaacatgctccagaaggccagacaaactctagaattttacccttgcacttctgaagagattgatcatgaagatatcacaaaagataaaaccagcacagtggaggcctgtttaccattggaattaaccaagaatgagagttgcctaaattccagagagacctctttcataactaatgggagttgcctggcctccagaaagacctcttttatgatggccctgtgccttagtagtatttatgaagacttgaagatgtaccaggtggagttcaagaccatgaatgcaaagcttctgatggatcctaagaggcagatctttctagatcaaaacatgctggcagttattgatgagctgatgcaggccctgaatttcaacagtgagactgtgccacaaaaatcctcccttgaagaaccggatttttataaaactaaaatcaagctctgcatacttcttcatgctttcagaattcgggcagtgactattgatagagtgatgagctatctgaatgcttccggaagcggagagggcagaggaagtctgctaacatgcggtgacgtcgaggagaatcctggacctgccccgcggcgggcgcgcggctgccggaccctcggtctcccggcgctgctactgctgctgctgctccggccgccggcgacgcggggcatcacgtgccctccccccatgtccgtggaacacgcagacatctgggtcaagagctacagcttgtactccagggagcggtacatttgtaactctggtttcaagcgtaaagccggcacgtccagcctgacggagtgcgtgttgaacaaggccacgaatgtcgcccactggacaacccccagtctcaaatgcattagagacgaacaaaaactcatctcagaagaggatctggctgtgggccaggacacgcaggaggtcatcgtggtgccacactccttgccctttaaggtggtggtgatctcagccatcctggccctggtggtgctcaccatcatctcccttatcatcctcatcatgctttggcagaagaagccacgtggaagcggagctactaacttcagcctgctgaagcaggctggagacgtggaggagaaccctggacctgactggacctggcgcatcctgttcttggtggcagctgctacgggagctcattccaactgggtgaatgtaataagtgatttgaaaaaaattgaagatcttattcaatctatgcatattgatgctactttatatacggaaagtgatgttcaccccagttgcaaagtaacagcaatgaagtgctttctcttggagttacaagttatttcacttgagtccggagatgcaagtattcatgatacagtagaaaatctgatcatcctagcaaacaacagtttgtcttctaatgggaatgtaacagaatctggatgcaaagaatgtgaggaactggaggaaaaaaatattaaagaatttttgcagagttttgtacatattgtccaaatgttcatcaacacttcttaagctagcttgactgactgagatacagcgtaccttcagctcacagacatgataagatacattgatgagtttggacaaaccacaactagaatgcagtgaaaaaaatgctttatttgtgaaatttgtgatgctattgctttatttgtaaccattataagctgcaataaacaagttaacaacaacaattgcattcattttatgtttcaggttcagggggaggtgtgggaggttttttaaagcaagtaaaacctctacaaatgtggtagtcgtcagctatcctgcaggaacttgtttatttgaaaatcaattcacaaaatccgagtagttattttgcctcccccttcccatttaacagaatacaccaatctctccccacgcacagctttaaacatttggataccattagatatagacatggttttagattccacattccaaacagtttcagagcgagccaatctggggtcagtgatagataaaaatccatcgggatagtcttttaaagcgctttcacagtccaactgctgcggatgcgactccggagtctggatcacggtcatctggaagaagaacgatgggaatcataatccgaaaacggtatcggacgattgtgtctcatcaaacccacaagcagccgctgtctgcgtcgctccgtgcgactgctgtttatgggatcagggtccacagtgtcctgaagcatgattttaatagcccttaacatcaactttctggtgcgatgcgcgcagcaacgcattctgatttcactcaaatctttgcagtaggtacaacacattattacaatattgtttaataaaccataattaaaagcgctccagccaaaactcatatctgatataatcgcccctgcatgaccatcataccaaagtttaatataaattaaatgacgttccctcaaaaacacactacccacatacatgatctcttttggcatgtgcatattaacaatctgtctgtaccatggacaacgttggttaatcatgcaacccaatataaccttccggaaccacactgccaacaccgctcccccagccatgcattgaagtgaaccctgctgattacaatgacaatgaagaacccaattctctcgaccgtgaatcacttgagaatgaaaaatatctatagtggcacaacatagacataaatgcatgcatcttctcataatttttaactcctcaggatttagaaacatatcccagggaataggaagctcttgcagaacagtaaagctggcagaacaaggaagaccacgaacacaacttacactatgcatagtcatagtatcacaatctggcaacagcgggtggtcttcagtcatagaagctcgggtttcattttcctcacaacgtggtaactgggctctggtgtaagggtgatgtctggcgcatgatgtcgagcgtgcgcgcaaccttgtcataatggagttgcttcctgacattctcgtattttgtatagcaaaacgcggccctggcagaacacactcttcttcgccttctatcctgccgcttagcgtgttccgtgtgatagttcaagtacaaccacactcttaagttggtcaaaagaatgctggcttcagttgtaatcaaaactccatcgcatctaatcgttctgaggaaatcatccaagcaatgcaactggattgtgtttcaagcaggagaggagagggaagagacggaagaaccatgttaatttttattccaaacgatctcgcagtacttcaaattgtagatcgcgcagatggcatctctcgcccccactgtgttggtgaaaaagcacagctagatcaaaagaaatgcgattttcaaggtgctcaacggtggcttccagcaaagcctccacgcgcacatccaagaacaaaagaataccaaaagaaggagcattttctaactcctcaatcatcatattacattcctgcaccattcccagataattttcagctttccagccttgaattattcgtgtcagttcttgtggtaaatccaatccacacattacaaacaggtcccggagggcgccctccaccaccattcttaaacacaccctcataatgacaaaatatcttgctcctgtgtcacctgtagcgaattgagaatggcaacatcaattgacatgcccttggctctaagttcttctttaagttctagttgtaaaaactctctcatattatcaccaaactgcttagccagaagccccccgggaacaagagcaggggacgctacagtgcagtacaagcgcagacctccccaattggctccagcaaaaacaagattggaataagcatattgggaaccgccagtaatatcatcgaagttgctggaaatataatcaggcagagtttcttgtaaaaattgaataaaagaaaaatttgccaaaaaaacattcaaaacctctgggatgcaaatgcaataggttaccgcgctgcgctccaacattgttagttttgaattagtctgcaaaaataaaaaaaaaaacaagcgtcatatcatagtagcctgacgaacagatggataaatcagtctttccatcacaagacaagccacagggtctccagctcgaccctcgtaaaacctgtcatcatgattaaacaacagcaccgaaagttcctcgcggtgaccagcatgaataattcttgatgaagcatacaatccagacatgttagcatcagttaacgagaaaaaacagccaacatagcctttgggtataattatgcttaatcgtaagtatagcaaagccacccctcgcggatacaaagtaaaaggcacaggagaataaaaaatataattatttctctgctgctgttcaggcaacgtcgcccccggtccctctaaatacacatacaaagcctcatcagccatggcttaccagacaaagtacagcgggcacacaaagcacaagctctaaagtgactctccaacctctccacaatatatatatacacaagccctaaactgacgtaatgggagtaaagtgtaaaaaatcccgccaaacccaacacacaccccgaaactgcgtcaccagggaaaagtacagtttcacttccgcaatcccaacaggcgtaacttcctctttctcacggtacgtgatatcccactaacttgcaacgtcattttcccacggtcgcaccgccccttttagccgttaaccccacagccaatcaccacacgatccacactttttaaaatcacctcatttacatattggcaccattccatctataaggtatattatatagataga

SEQ ID NO: 220 - DNA, 35236 bp, Artificial Sequence
  Genome sequence of NG-785A virus
tctatctatataatataccttatagatggaatggtgccaatatgtaaatgaggtgattttaaaaagtgtggatcgtgtggtgattggctgtggggttaacggctaaaaggggcggtgcgaccgtgggaaaatgacgttttgtgggggtggagtttttttgcaagttgtcgcgggaaatgtgacgcataaaaaggcttttttctcacggaactacttagttttcccacggtatttaacaggaaatgaggtagttttgaccggatgcaagtgaaaattgttgattttcgcgcgaaaactgaatgaggaagtgtttttctgaataatgtggtatttatggcagggtggagtatttgttcagggccaggtagactttgacccattacgtggaggtttcgattaccgtgttttttacctgaatttccgcgtaccgtgtcaaagtcttctgtttttacgtaggtgtcagctgatcgctagggtatttatacctcagggtttgtgtcaagaggccactcttgagtgccagcgagaagagttttctcctctgcgccggcagtttaataataaaaaaatgagagatttgcgatttctgcctcaggaaataatctctgctgagactggaaatgaaatattggagcttgtggtgcacgccctgatgggagacgatccggagccacctgtgcagctttttgagcctcctacgcttcaggaactgtatgatttagaggtagagggatcggaggattctaatgaggaagctgtaaatggcttttttaccgattctatgcttttagctgctaatgaagggttagaattagatccgcctttggacacttttgatactccaggggtaattgtggaaagcggtacaggtgtaagaaaattacctgatttgagttccgtggactgtgatttgcactgctatgaagacgggtttcctccgagtgatgaggaggaccatgaaaaggagcagtccatgcagactgcagcgggtgagggagtgaaggctgccaatgttggttttcagttggattgcccggagcttcctggacatggctgtaagtcttgtgaatttcacaggaaaaatactggagtaaaggaactgttatgttcgctttgttatatgagaacgcactgccactttatttacagtaagtgtgtttaagttaaaatttaaaggaatatgctgtttttcacatgtatattgagtgtgagttttgtgcttcttattataggtcctgtgtctgatgctgatgaatcaccatctcctgattctactacctcacctcctgagattcaagcacctgttcctgtggacgtgcgcaagcccattcctgtgaagcttaagcctgggaaacgtccagcagtggaaaaacttgaggacttgttacagggtggggacggacctttggacttgagtacacggaaacgtccaagacaataagtgttccatatccgtgtttacttaaggtgacgtcaatatttgtgtgacagtgcaatgtaataaaaatatgttaactgttcactggtttttattgctttttgggcggggactcaggtatataagtagaagcagacctgtgtggttagctcataggagctggctttcatccatggaggtttgggccattttggaagaccttaggaagactaggcaactgttagagaacgcttcggacggagtctccggtttttggagattctggttcgctagtgaattagctagggtagtttttaggataaaacaggactataaacaagaatttgaaaagttgttggtagattgcccaggactttttgaagctcttaatttgggccatcaggttcactttaaagaaaaagttttatcagttttagacttttcaaccccaggtagaactgctgctgctgtggcttttcttacttttatattagataaatggatcccgcagactcatttcagcaggggatacgttttggatttcatagccacagcattgtggagaacatggaaggttcgcaagatgaggacaatcttaggttactggccagtgcagcctttgggtgtagcgggaatcctgaggcatccaccggtcatgccagcggttctggaggaggaacagcaagaggacaacccgagagccggcctggaccctccagtggaggaggcggagtagctgacttgtctcctgaactgcaacgggtgcttactggatctacgtccactggacgggataggggcgttaagagggagagggcatctagtggtactgatgctagatctgagttggctttaagtttaatgagtcgcagacgtcctgaaaccatttggtggcatgaggttcagaaagagggaagggatgaagtttctgtattgcaggagaaatattcactggaacaggtgaaaacatgttggttggagcctgaggatgattgggaggtggccattaaaaattatgccaagatagctttgaggcctgataaacagtataagattactagacggattaatatccggaatgcttgttacatatctggaaatggggctgaggtggtaatagatactcaagacaaggcagttattagatgctgcatgatggatatgtggcctggggtagtcggtatggaagcagtaacttttgtaaatgttaagtttaggggagatggttataatggaatagtgtttatggccaataccaaacttatattgcatggttgtagcttttttggtttcaacaatacctgtgtagatgcctggggacaggttagtgtacggggatgtagtttctatgcgtgttggattgccacagctggcagaaccaagagtcaattgtctctgaagaaatgcatatttcaaagatgtaacctgggcattctgaatgaaggcgaagcaagggtccgccactgcgcttctacagatactggatgttttattttgattaagggaaatgccagcgtaaagcataacatgatttgcggtgcttccgatgagaggccttatcaaatgctcacttgtgctggtgggcattgtaatatgctggctactgtgcatattgtttcccatcaacgcaaaaaatggcctgtttttgatcacaatgtgatgacgaagtgtaccatgcatgcaggtgggcgtagaggaatgtttatgccttaccagtgtaacatgaatcatgtgaaagtgttgttggaaccagatgccttttccagaatgagcctaacaggaatttttgacatgaacatgcaaatctggaagatcctgaggtatgatgatacgagatcgagggtacgcgcatgcgaatgcggaggcaagcatgccaggttccagccggtgtgtgtagatgtgactgaagatctcagaccggatcatttggttattgcccgcactggagcagagttcggatccagtggagaagaaactgactaaggtgagtattgggaaaactttggggtgggattttcagatggacagattgagtaaaaatttgttttttctgtcttgcagctgtcatgagtggaaacgcttcttttaaggggggagtcttcagcccttatctgacagggcgtctcccatcctgggcaggagttcgtcagaatgttatgggatctactgtggatggaagacccgtccaacccgccaattcttcaacgctgacctatgctactttaagttcttcacctttggacgcagctgcagctgccgccgccgcttctgttgccgctaacactgtgcttggaatgggttactatggaagcatcatggctaattccacttcctctaataacccttctaccctgactcaggacaagttacttgtccttttggcccagctggaggctttgacccaacgtctgggtgaactttctcagcaggtggtcgagttgcgagtacaaactgagtctgctgtcggcacggcaaagtctaaataaaaaaatcccagaatcaatgaataaataaacaagcttgttgttgatttaaaatcaagtgtttttatttcatttttcgcgcacggtatgccctagaccaccgatctctatcattgagaactcggtggattttttccaggatcctatagaggtgggattgaatgtttagatacatgggcattaggccgtctttggggtggagatagctccattgaagggattcatgctccggggtagtgttgtaaatcacccagtcataacaaggtcgcagtgcatggtgttgcacaatatcttttagaagtaggctgattgccacagataagcccttggtgtaggtgtttacaaaccggttgagctgggatgggtgcattcggggtgaaattatgtgcattttggattggatttttaagttggcaatattgccgccaagatcccgtcttgggttcatgttatgaaggaccaccaagacggtgtatccggtacatttaggaaatttatcgtgcagcttggatggaaaagcgtggaaaaatttggagacacccttgtgtcctccaagattttccatgcactcatccatgataatagcaatggggccgtgggcagcggcgcgggcaaacacgttccgtgggtctgacacatcatagttatgttcctgagttaaatcatcataagccattttaatgaatttggggcggagagtaccagattggggtatgaatgttccttcgggccccggagcatagttcccctcacagatttgcatttcccaagctttcagttccgagggtggaatcatgtccacctggggggctatgaaaaacaccgtttctggggcgggggtgattaattgtgatgatagcaaatttctgagcaattgagatttgccacatccggtggggccataaatgattccgattacgggttgcaggtggtagtttagggaacggcaactgccgtcttctcgaagcaagggggccacctcgttcatcatttcccttacatgcatattttcccgcaccaaatccattaggaggcgctctcctcctagtgatagaagttcttgtagtgaggaaaagtttttcagcggtttcagaccgtcagccatgggcattttggagagagtttgctgcaaaagttctagtctgttccacagttcagtgatgtgttctatggcatctcgatccagcagacctcctcgtttcgcgggtttggacggctcctggaatagggtatgagacgatgggcgtccagcgctgccagggttcggtccttccagggtctcagtgttcgagtcagggttgtttccgtcacagtgaaggggtgtgcgcctgcttgggcgcttgccagggtgcgcttcagactcatcctgctggtcgaaaacttctgtcgcttggcgccctgtatgtcggccaagtagcagtttaccatgagttcgtagttgagcgcctcggctgcgtggcctttggcgcggagcttacctttggaagttttcttgcataccgggcagtataggcatttcagcgcatacaacttgggcgcaaggaaaacggattctggggagtatgcatctgcgccgcaggaggcgcaaacagtttcacattccaccagccaggttaaatccggttcattggggtcaaaaacaagttttccgccatattttttgatgcgtttcttacctttggtctccatgagttcgtgtcctcgttgagtgacaaacaggctgtccgtgtccccgtagactgattttacaggcctcttctccagtggagtgcctcggtcttcttcgtacaggaactctgaccactctgatacaaaggcgcgcgtccaggccagcacaaaggaggctatgtgggaggggtagcgatcgttgtcaaccagggggtccaccttttccaaagtatgcaaacacatgtcaccctcttcaacatccaggaatgtgattggcttgtaggtgtatttcacgtgacctggggtccccgctgggggggtataaaagggggcggttctttgctcttcctcactgtcttccggatcgctgtccaggaacgtcagctgttggggtaggtattccctctcgaaggcgggcatgacctctgcactcaggttgtcagtttctaagaacgaggaggatttgatattgacagtgccggttgagatgcctttcatgaggttttcgtccatctggtcagaaaacacaatttttttattgtcaagtttggtggcaaatgatccatacagggcgttggataaaagtttggcaatggatcgcatggtttggttcttttccttgtccgcgcgctctttggcggcgatgttgagttggacatactcgcgtgccaggcacttccattcggggaagatagttgttaattcatctggcacgattctcacttgccaccctcgattatgcaaggtaattaaatccacactggtggccacctcgcctcgaaggggttcattggtccaacagagcctacctcctttcctagaacagaaagggggaagtgggtctagcataagttcatcgggagggtctgcatccatggtaaagattcccggaagtaaatccttatcaaaatagctgatgggagtggggtcatctaaggccatttgccattctcgagctgccagtgcgcgctcatatgggttaaggggactgccccatggcatgggatgggtgagtgcagaggcatacatgccacagatgtcatagacgtagatgggatcctcaaagatgcctatgtaggttggatagcatcgcccccctctgatacttgctcgcacatagtcatatagttcatgtgatggcgctagcagccccggacccaagttggtgcgattgggtttttctgttctgtagacgatctggcgaaagatggcgtgagaattggaagagatggtgggtctttgaaaaatgttgaaatgggcatgaggtagacctacagagtctctgacaaagtgggcataagattcttgaagcttggttaccagttcggcggtgacaagtacgtctagggcgcagtagtcaagtgtttcttgaatgatgtcataacctggttggtttttcttttcccacagttcgcggttgagaaggtattcttcgcgatccttccagtactcttctagcggaaacccgtctttgtctgcacggtaagatcctagcatgtagaactgattaactgccttgtaagggcagcagcccttctctacgggtagagagtatgcttgagcagcttttcgtagcgaagcgtgagtaagggcaaaggtgtctctgaccatgactttgaggaattggtatttgaagtcgatgtcgtcacaggctccctgttcccagagttggaagtctacccgtttcttgtaggcggggttgggcaaagcgaaagtaacatcattgaagagaatcttgccggccctgggcatgaaattgcgagtgatgcgaaaaggctgtggtacttccgctcggttattgataacctgggcagctaggacgatctcgtcgaaaccgttgatgttgtgtcctacgatgtataattctatgaaacgcggcgtgcctctgacgtgaggtagcttactgagctcatcaaaggttaggtctgtggggtcagataaggcgtagtgttcgagagcccattcgtgcaggtgaggattcgctttaaggaaggaggaccagaggtccactgccagtgctgtttgtaactggtcccggtactgacgaaaatgccgtccgactgccattttttctggggtgacgcaatagaaggtttgggggtcctgccgccagcgatcccacttgagttttatggcgaggtcataggcgatgttgacgagccgctggtctccagagagtttcatgaccagcatgaaggggattagctgcttgccaaaggaccccatccaggtgtaggtttccacatcgtaggtgagaaagagcctttctgtgcgaggatgagagccaatcgggaagaactggatctcctgccaccagttggaggaatggctgttgatgtgatggaagtagaactccctgcgacgcgccgagcattcatgcttgtgcttgtacagacggccgcagtagtcgcagcgttgcacgggttgtatctcgtgaatgagttgtacctggcttcccttgacgagaaatttcagtgggaagccgaggcctggcgattgtatctcgtgctttactatgttgtctgcatcggcctgttcatcttctgtctcgatggtggtcatgctgacgagccctcgcgggaggcaagtccagacctcggcgcggcaggggcggagctcgaggacgagagcgcgcaggctggagctgtccagggtcctgagacgctgcggactcaggttagtaggcagtgtcaggagattaacttgcatgatcttttggagggcgtgcgggaggttcagatagtacttgatctcaacgggtccgttggtggagatgtcgatggcttgcagggttccgtgtcccttgggcgctaccaccgtgcccttgtttttcattttggacggcggtggctctgttgcttcttgcatgtttagaagcggtgtcgagggcgcgcaccgggcggcaggggcggctcgggacccggcggcatggctggcagtggtacgtcggcgccgcgcgcgggtaggttctggtactgcgccctgagaagactcgcatgcgcgacgacgcggcggttgacatcctggatctgacgcctctgggtgaaagctaccggccccgtgagcttgaacctgaaagagagttcaacagaatcaatctcggtatcgttgacggcggcttgcctaaggatttcttgcacgtcaccagagttgtcctggtaggcgatctccgccatgaactgctcgatctcttcctcttgaagatctccgcggcccgctctctcgacggtggccgcgaggtcgttggagatgcgcccaatgagttgagagaatgcattcatgcccgcctcgttccagacgcggctgtagaccacggcccccacgggatctctcgcgcgcatgaccacctgggcgaggttgagctccacgtggcgggtgaagaccgcatagttgcataggcgctggaaaaggtagttgagtgtggtggcgatgtgctcggtgacgaagaaatacatgatccatcgtctcagcggcatctcgctgacatcgcccagagcttccaagcgctccatggcctcgtagaagtccacggcaaaattaaaaaactgggagtttcgcgcggacacggtcaactcctcttccagaagacggataagttcggcgatggtggtgcgcacctcgcgctcgaaagcccctgggatttcttcctcaatctcttcttcttccactaacatctcttcctcttcaggtggggctgcaggaggagggggaacgcggcgacgccggcggcgcacgggcagacggtcgatgaatctttcaatgacctctccgcggcggcggcgcatggtttcagtgacggcgcggccgttctcgcgcggtcgcagagtaaaaacaccgccgcgcatctccttaaagtggtgactgggaggttctccgtttgggagggagagggcgctgattatacattttattaattggcccgtagggactgcacgcagagatctgatcgtgtcaagatccacgggatctgaaaacctttcgacgaaagcgtctaaccagtcacagtcacaaggtaggctgagtacggcttcttgtgggcgggggtggttatgtgttcggtctgggtcttctgtttcttcttcatctcgggaaggtgagacgatgctgctggtgatgaaattaaagtaggcagttctaagacggcggatggtggcgaggagcaccaggtctttgggtccggcttgctggatacgcaggcgattggccattccccaagcattatcctgacatctagcaagatctttgtagtagtcttgcatgagccgttctacgggcacttcttcctcacccgttctgccatgcatacgtgtgagtccaaatccgcgcattggttgtaccagtgccaagtcagctacgactctttcggcgaggatggcttgctgtacttgggtaagggtggcttgaaagtcatcaaaatccacaaagcggtggtaagctcctgtattaatggtgtaagcacagttggccatgactgaccagttaactgtctggtgaccagggcgcacgagctcggtgtatttaaggcgcgaataggcgcgggtgtcaaagatgtaatcgttgcaggtgcgcaccagatactggtaccctataagaaaatgcggcggtggttggcggtagagaggccatcgttctgtagctggagcgccaggggcgaggtcttccaacataaggcggtgatagccgtagatgtacctggacatccaggtgattcctgcggcggtagtagaagcccgaggaaactcgcgtacgcggttccaaatgttgcgtagcggcatgaagtagttcattgtaggcacggtttgaccagtgaggcgcgcgcagtcattgatgctctatagacacggagaaaatgaaagcgttcagcgactcgactccgtagcctggaggaacgtgaacgggttgggtcgcggtgtaccccggttcgagacttgtactcgagccggccggagccgcggctaacgtggtattggcactcccgtctcgacccagcctacaaaaatccaggatacggaatcgagtcgttttgctggtttccgaatggcagggaagtgagtcctattttttttttttgccgctcagatgcatcccgtgctgcgacagatgcgcccccaacaacagcccccctcgcagcagcagcagcagcaatcacaaaaggctgtccctgcaactactgcaactgccgccgtgagcggtgcgggacagcccgcctatgatctggacttggaagagggcgaaggactggcacgtctaggtgcgccttcacccgagcggcatccgcgagttcaactgaaaaaagattctcgcgaggcgtatgtgccccaacagaacctatttagagacagaagcggcgaggagccggaggagatgcgagcttcccgctttaacgcgggtcgtgagctgcgtcacggtttggaccgaagacgagtgttgcgggacgaggatttcgaagttgatgaaatgacagggatcagtcctgccagggcacacgtggctgcagccaaccttgtatcggcttacgagcagacagtaaaggaagagcgtaacttccaaaagtcttttaataatcatgtgcgaaccctgattgcccgcgaagaagttacccttggtttgatgcatttgtgggatttgatggaagctatcattcagaaccctactagcaaacctctgaccgcccagctgtttctggtggtgcaacacagcagagacaatgaggctttcagagaggcgctgctgaacatcaccgaacccgaggggagatggttgtatgatcttatcaacattctacagagtatcatagtgcaggagcggagcctgggcctggccgagaaggtggctgccatcaattactcggttttgagcttgggaaaatattacgctcgcaaaatctacaagactccatacgttcccatagacaaggaggtgaagatagatgggttctacatgcgcatgacgctcaaggtcttgaccctgagcgatgatcttggggtgtatcgcaatgacagaatgcatcgcgcggttagcgccagcaggaggcgcgagttaagcgacagggaactgatgcacagtttgcaaagagctctgactggagctggaaccgagggtgagaattacttcgacatgggagctgacttgcagtggcagcctagtcgcagggctctgagcgccgcgacggcaggatgtgagcttccttacatagaagaggcggatgaaggcgaggaggaagagggcgagtacttggaagactgatggcacaacccgtgttttttgctagatggaacagcaagcaccggatcccgcaatgcgggcggcgctgcagagccagccgtccggcattaactcctcggacgattggacccaggccatgcaacgtatcatggcgttgacgactcgcaaccccgaagcctttagacagcaaccccaggccaaccgtctatcggccatcatggaagctgtagtgccttcccgctctaatcccactcatgagaaggtcctggccatcgtgaacgcgttggtggagaacaaagctattcgtccagatgaggccggactggtatacaacgctctcttagaacgcgtggctcgctacaacagtagcaatgtgcaaaccaatttggaccgtatgataacagatgtacgcgaagccgtgtctcagcgcgaaaggttccagcgtgatgccaacctgggttcgctggtggcgttaaatgctttcttgagtactcagcctgctaatgtgccgcgtggtcaacaggattatactaactttttaagtgctttgagactgatggtatcagaagtacctcagagcgaagtgtatcagtccggtcctgattacttctttcagactagcagacagggcttgcagacggtaaatctgagccaagcttttaaaaaccttaaaggtttgtggggagtgcatgccccggtaggagaaagagcaaccgtgtctagcttgttaactccgaactcccgcctattattactgttggtagctcctttcaccgacagcggtagcatcgaccgtaattcctatttgggttacctactaaacctgtatcgcgaagccatagggcaaagtcaggtggacgagcagacctatcaagaaattacccaagtcagtcgcgctttgggacaggaagacactggcagtttggaagccactctgaacttcttgcttaccaatcggtctcaaaagatccctcctcaatatgctcttactgcggaggaggagaggatccttagatatgtgcagcagagcgtgggattgtttctgatgcaagagggggcaactccgactgcagcactggacatgacagcgcgaaatatggagcccagcatgtatgccagtaaccgacctttcattaacaaactgctggactacttgcacagagctgccgctatgaactctgattatttcaccaatgccatcttaaacccgcactggctgcccccacctggtttctacacgggcgaatatgacatgcccgaccctaatgacggatttctgtgggacgacgtggacagcgatgttttttcacctctttctgatcatcgcacgtggaaaaaggaaggcggcgatagaatgcattcttctgcatcgctgtccggggtcatgggtgctaccgcggctgagcccgagtctgcaagtccttttcctagtctacccttttctctacacagtgtacgtagcagcgaagtgggtagaataagtcgcccgagtttaatgggcgaagaggagtatctaaacgattccttgctcagaccggcaagagaaaaaaatttcccaaacaatggaatagaaagtttggtggataaaatgagtagatggaagacttatgctcaggatcacagagacgagcctgggatcatggggattacaagtagagcgagccgtagacgccagcgccatgacagacagaggggtcttgtgtgggacgatgaggattcggccgatgatagcagcgtgctggacttgggtgggagaggaaggggcaacccgtttgctcatttgcgccctcgcttgggtggtatgttgtaaaaaaaaataaaaaaaaaactcaccaaggccatggcgacgagcgtacgttcgttcttctttattatctgtgtctagtataatgaggcgagtcgtgctaggcggagcggtggtgtatccggagggtcctcctccttcgtacgagagcgtgatgcagcagcagcaggcgacggcggtgatgcaatccccactggaggctccctttgtgcctccgcgatacctggcacctacggagggcagaaacagcattcgttattcggaactggcacctcagtacgataccaccaggttgtatctggtggacaacaagtcggcggacattgcttctctgaactatcagaatgaccacagcaacttcttgaccacggtggtgcaaaacaatgactttacccctacggaagccagcacccagaccattaactttgatgaacgatcgcggtggggcggtcagctaaagaccatcatgcatactaacatgccaaacgtgaacgagtatatgtttagtaacaagttcaaagcgcgtgtgatggtgtccagaaaacctcccgacggtgctgcagttggggatacttatgatcacaagcaggatattttgaaatatgagtggttcgagtttactttgccagaaggcaacttttcagttactatgactattgatttgatgaacaatgccatcatagataattacttgaaagtgggtagacagaatggagtgcttgaaagtgacattggtgttaagttcgacaccaggaacttcaagctgggatgggatcccgaaaccaagttgatcatgcctggagtgtatacgtatgaagccttccatcctgacattgtcttactgcctggctgcggagtggattttaccgagagtcgtttgagcaaccttcttggtatcagaaaaaaacagccatttcaagagggttttaagattttgtatgaagatttagaaggtggtaatattccggccctcttggatgtagatgcctatgagaacagtaagaaagaacaaaaagccaaaatagaagctgctacagctgctgcagaagctaaggcaaacatagttgccagcgactctacaagggttgctaacgctggagaggtcagaggagacaattttgcgccaacacctgttccgactgcagaatcattattggccgatgtgtctgaaggaacggacgtgaaactcactattcaacctgtagaaaaagatagtaagaatagaagctataatgtgttggaagacaaaatcaacacagcctatcgcagttggtatctttcgtacaattatggcgatcccgaaaaaggagtgcgttcctggacattgctcaccacctcagatgtcacctgcggagcagagcaggtctactggtcgcttccagacatgatgaaggatcctgtcactttccgctccactagacaagtcagtaactaccctgtggtgggtgcagagcttatgcccgtcttctcaaagagcttctacaacgaacaagctgtgtactcccagcagctccgccagtccacctcgcttacgcacgtcttcaaccgctttcctgagaaccagattttaatccgtccgccggcgcccaccattaccaccgtcagtgaaaacgttcctgctctcacagatcacgggaccctgccgttgcgcagcagtatccggggagtccaacgtgtgaccgttactgacgccagacgccgcacctgtccctacgtgtacaaggcactgggcatagtcgcaccgcgcgtcctttcaagccgcactttctaaaaaaaaaaaaaatgtccattcttatctcgcccagtaataacaccggttggggtctgcgcgctccaagcaagatgtacggaggcgcacgcaaacgttctacccaacatcctgtccgtgttcgcggacattttcgcgctccatggggcgccctcaagggccgcactcgcgttcgaaccaccgtcgatgatgtaatcgatcaggtggttgccgacgcccgtaattatactcctactgcgcctacatctactgtggatgcagttattgacagtgtagtggctgacgctcgcaactatgctcgacgtaagagccggcgaaggcgcattgccagacgccaccgagctaccactgccatgcgagccgcaagagctctgctacgaagagctagacgcgtggggcgaagagccatgcttagggcggccagacgtgcagcttcgggcgccagcgccggcaggtcccgcaggcaagcagccgctgtcgcagcggcgactattgccgacatggcccaatcgcgaagaggcaatgtatactgggtgcgtgacgctgccaccggtcaacgtgtacccgtgcgcacccgtccccctcgcacttagaagatactgagcagtctccgatgttgtgtcccagcggcgaggatgtccaagcgcaaatacaaggaagaaatgctgcaggttatcgcacctgaagtctacggccaaccgttgaaggatgaaaaaaaaccccgcaaaatcaagcgggttaaaaaggacaaaaaagaagaggaagatggcgatgatgggctggcggagtttgtgcgcgagtttgccccacggcgacgcgtgcaatggcgtgggcgcaaagttcgacatgtgttgagacctggaacttcggtggtctttacacccggcgagcgttcaagcgctacttttaagcgttcctatgatgaggtgtacggggatgatgatattcttgagcaggcggctgaccgattaggcgagtttgcttatggcaagcgtagtagaataacttccaaggatgagacagtgtcgatacccttggatcatggaaatcccacccctagtcttaaaccggtcactttgcagcaagtgttacccgtaactccgcgaacaggtgttaaacgcgaaggtgaagatttgtatcccactatgcaactgatggtacccaaacgccagaagttggaggacgttttggagaaagtaaaagtggatccagatattcaacctgaggttaaagtgagacccattaagcaggtagcgcctggtctgggggtacaaactgtagacattaagattcccactgaaagtatggaagtgcaaactgaacccgcaaagcctactgccacctccactgaagtgcaaacggatccatggatgcccatgcctattacaactgacgccgccggtcccactcgaagatcccgacgaaagtacggtccagcaagtctgttgatgcccaattatgttgtacacccatctattattcctactcctggttaccgaggcactcgctactatcgcagccgaaacagtacctcccgccgtcgccgcaagacacctgcaaatcgcagtcgtcgccgtagacgcacaagcaaaccgactcccggcgccctggtgcggcaagtgtaccgcaatggtagtgcggaacctttgacactgccgcgtgcgcgttaccatccgagtatcatcacttaatcaatgttgccgctgcctccttgcagatatggccctcacttgtcgccttcgcgttcccatcactggttaccgaggaagaaactcgcgccgtagaagagggatgttgggacgcggaatgcgacgctacaggcgacggcgtgctatccgcaagcaattgcggggtggttttttaccagccttaattccaattatcgctgctgcaattggcgcgataccaggcatagcttccgtggcggttcaggcctcgcaacgacattgacattggaaaaaaacgtataaataaaaaaaaaaaaatacaatggactctgacactcctggtcctgtgactatgttttcttagagatggaagacatcaatttttcatccttggctccgcgacacggcacgaagccgtacatgggcacctggagcgacatcggcacgagccaactgaacgggggcgccttcaattggagcagtatctggagcgggcttaaaaattttggctcaaccataaaaacatacgggaacaaagcttggaacagcagtacaggacaggcgcttagaaataaacttaaagaccagaacttccaacaaaaagtagtcgatgggatagcttccggcatcaatggagtggtagatttggctaaccaggctgtgcagaaaaagataaacagtcgtttggacccgccgccagcaaccccaggtgaaatgcaagtggaggaagaaattcctccgccagaaaaacgaggcgacaagcgtccgcgtcccgatttggaagagacgctggtgacgcgcgtagatgaaccgccttcttatgaggaagcaacgaagcttggaatgcccaccactagaccgatagccccaatggccaccggggtgatgaaaccttctcagttgcatcgacccgtcaccttggatttgccccctccccctgctgctactgctgtacccgcttctaagcctgtcgctgccccgaaaccagtcgccgtagccaggtcacgtcccgggggcgctcctcgtccaaatgcgcactggcaaaatactctgaacagcatcgtgggtctaggcgtgcaaagtgtaaaacgccgtcgctgcttttaattaaatatggagtagcgcttaacttgcctatctgtgtatatgtgtcattacacgccgtcacagcagcagaggaaaaaaggaagaggtcgtgcgtcgacgctgagttactttcaagatggccaccccatcgatgctgccccaatgggcatacatgcacatcgccggacaggatgcttcggagtacctgagtccgggtctggtgcagttcgcccgcgccacagacacctacttcaatctgggaaataagtttagaaatcccaccgtagcgccgacccacgatgtgaccaccgaccgtagccagcggctcatgttgcgcttcgtgcccgttgaccgggaggacaatacatactcttacaaagtgcggtacaccctggccgtgggcgacaacagagtgctggatatggccagcacgttctttgacattaggggtgtgttggacagaggtcccagtttcaaaccctattctggtacggcttacaactccctggctcctaaaggcgctccaaatacatctcagtggattgcagaaggtgtaaaaaatacaactggtgaggaacacgtaacagaagaggaaaccaatactactacttacacttttggcaatgctcctgtaaaagctgaagctgaaattacaaaagaaggactcccagtaggtttggaagtttcagatgaagaaagtaaaccgatttatgctgataaaacatatcagccagaacctcagctgggagatgaaacttggactgaccttgatggaaaaaccgaaaagtatggaggcagggctctcaaacccgatactaagatgaaaccatgctacgggtcctttgccaaacctactaatgtgaaaggcggtcaggcaaaacaaaaaacaacggagcagccaaatcagaaagtcgaatatgatatcgacatggagttttttgatgcggcatcgcagaaaacaaacttaagtcctaaaattgtcatgtatgcagaaaatgtaaatttggaaactccagacactcatgtagtgtacaaacctggaacagaagacacaagttccgaagctaatttgggacaacaatctatgcccaacagacccaactacattggcttcagagataactttattggacttatgtactataacagtactggtaacatgggggtgctggctggtcaagcgtctcagttaaatgcagtggttgacttgcaggacagaaacacagaactttcttaccaactcttgcttgactctctgggcgacagaaccagatactttagcatgtggaatcaggctgtggacagttatgatcctgatgtacgtgttattgaaaatcatggtgtggaagatgaacttcccaactactgttttccactggacggcataggtgttccaacaaccagttacaaatcaatagttccaaatggagacaatgcgcctaattggaaggaacctgaagtaaatggaacaagtgagatcggacagggtaatttgtttgccatggaaattaaccttcaagccaatctatggcgaagtttcctttattccaatgtggctctatatctcccagactcgtacaaatacaccccgtccaatgtcactcttccagaaaacaaaaacacctacgactacatgaacgggcgggtggtgccgccatctctagtagacacctatgtgaacattggtgccaggtggtctctggatgccatggacaatgtcaacccattcaaccaccaccgtaacgctggcttgcgttaccgatccatgcttctgggtaacggacgttatgtgcctttccacatacaagtgcctcaaaaattcttcgctgttaaaaacctgctgcttctcccaggctcctacacttatgagtggaactttaggaaggatgtgaacatggttctacagagttccctcggtaacgacctgcgggtagatggcgccagcatcagtttcacgagcatcaacctctatgctacttttttccccatggctcacaacaccgcttccacccttgaagccatgctgcggaatgacaccaatgatcagtcattcaacgactacctatctgcagctaacatgctctaccccattcctgccaatgcaaccaatattcccatttccattccttctcgcaactgggcggctttcagaggctggtcatttaccagactgaaaaccaaagaaactccctctttggggtctggatttgacccctactttgtctattctggttctattccctacctggatggtaccttctacctgaaccacacttttaagaaggtttccatcatgtttgactcttcagtgagctggcctggaaatgacaggttactatctcctaacgaatttgaaataaagcgcactgtggatggcgaaggctacaacgtagcccaatgcaacatgaccaaagactggttcttggtacagatgctcgccaactacaacatcggctatcagggcttctacattccagaaggatacaaagatcgcatgtattcatttttcagaaacttccagcccatgagcaggcaggtggttgatgaggtcaattacaaagacttcaaggccgtcgccataccctaccaacacaacaactctggctttgtgggttacatggctccgaccatgcgccaaggtcaaccctatcccgctaactatccctatccactcattggaacaactgccgtaaatagtgttacgcagaaaaagttcttgtgtgacagaaccatgtggcgcataccgttctcgagcaacttcatgtctatgggggcccttacagacttgggacagaatatgctctatgccaactcagctcatgctctggacatgacctttgaggtggatcccatggatgagcccaccctgctttatcttctcttcgaagttttcgacgtggtcagagtgcatcagccacaccgcggcatcatcgaggcagtctacctgcgtacaccgttctcggccggtaacgctaccacgtaagaagcttcttgcttcttgcaaatagcagctgcaaccatggcctgcggatcccaaaacggctccagcgagcaagagctcagagccattgtccaagacctgggttgcggaccctattttttgggaacctacgataagcgcttcccggggttcatggcccccgataagctcgcctgtgccattgtaaatacggccggacgtgagacggggggagagcactggttggctttcggttggaacccacgttctaacacctgctacctttttgatccttttggattctcggatgatcgtctcaaacagatttaccagtttgaatatgagggtctcctgcgccgcagcgctcttgctaccaaggaccgctgtattacgctggaaaaatctacccagaccgtgcagggtccccgttctgccgcctgcggacttttctgctgcatgttccttcacgcctttgtgcactggcctgaccgtcccatggacggaaaccccaccatgaaattgctaactggagtgccaaacaacatgcttcattctcctaaagtccagcccaccctgtgtgacaatcaaaaagcactctaccattttcttaatacccattcgccttattttcgctcccatcgtacacacatcgaaagggccactgcgttcgaccgtatggatgttcaataatgactcatgtaaacaacgtgttcaataaacatcactttatttttttacatgtatcaaggctctgcattacttatttatttacaagtcgaatgggttctgacgagaatcagaatgacccgcaggcagtgatacgttgcggaactgatacttgggttgccacttgaattcgggaatcaccaacttgggaaccggtatatcgggcaggatgtcactccacagctttctggtcagctgcaaagctccaagcaggtcaggagccgaaatcttgaaatcacaattaggaccagtgctttgagcgcgagagttgcggtacaccggattgcagcactgaaacaccatcagcgacggatgtctcacgcttgccagcacggtgggatctgcaatcatgcccacatccagatcttcagcattggcaatgctgaacggggtcatcttgcaggtctgcctacccatggcgggcacccaattaggcttgtggttgcaatcgcagtgcagggggatcagtatcatcttggcctgatcctgtctgattcctggatacacggctctcatgaaagcatcatattgcttgaaagcctgctgggctttactaccctcggtataaaacatcccgcaggacctgctcgaaaactggttagctgcacagccggcatcattcacacagcagcgggcgtcattgttagctatttgcaccacacttctgccccagcggttttgggtgattttggttcgctcgggattctcctttaaggctcgttgtccgttctcgctggccacatccatctcgataatctgctccttctgaatcataatattgccatgcaggcacttcagcttgccctcataatcattgcagccatgaggccacaacgcacagcctgtacattcccaattatggtgggcgatctgagaaaaagaatgtatcattccctgcagaaatcttcccatcatcgtgctcagtgtcttgtgactagtgaaagttaactggatgcctcggtgctcctcgtttacgtactggtgacagatgcgcttgtattgttcgtgttgctcaggcattagtttaaaagaggttctaagttcgttatccagcctgtacttctccatcagcagacacatcacttccatgcctttctcccaagcagacaccaggggcaagctaatcggattcttaacagtgcaggcagcagctcctttagccagagggtcatctttagcgatcttctcaatgcttcttttgccatccttctcaacgatgcgcacgggcgggtagctgaaacccactgctacaagttgcgcctcttctctttcttcttcgctgtcttgactgatgtcttgcatggggatatgtttggtcttccttggcttctttttggggggtatcggaggaggaggactgtcgctccgttccggagacagggaggattgtgacgtttcgctcaccattaccaactgactgtcggtagaagaacctgaccccacacggcgacaggtgtttctcttcgggggcagaggtggaggcgattgcgaagggctgcggtccgacctggaaggcggatgactggcagaaccccttccgcgttcgggggtgtgctccctgtggcggtcgcttaactgatttccttcgcggctggccattgtgttctcctaggcagagaaacaacagacatggaaactcagccattgctgtcaacatcgccacgagtgccatcacatctcgtcctcagcgacgaggaaaaggagcagagcttaagcattccaccgcccagtcctgccaccacctctaccctagaagataaggaggtcgacgcatctcatgacatgcagaataaaaaagcgaaagagtctgagacagacatcgagcaagacccgggctatgtgacaccggtggaacacgaggaagagttgaaacgctttctagagagagaggatgaaaactgcccaaaacaacgagcagataactatcaccaagatgctggaaatagggatcagaacaccgactacctcatagggcttgacggggaagacgcgctccttaaacatctagcaagacagtcgctcatagtcaaggatgcattattggacagaactgaagtgcccatcagtgtggaagagctcagccgcgcctacgagcttaacctcttttcacctcgtactccccccaaacgtcagccaaacggcacctgcgagccaaatcctcgcttaaacttttatccagcttttgctgtgccagaagtactggctacctatcacatcttttttaaaaatcaaaaaattccagtctcctgccgcgctaatcgcacccgcgccgatgccctactcaatctgggacctggttcacgcttacctgatatagcttccttggaagaggttccaaagatcttcgagggtctgggcaataatgagactcgggccgcaaatgctctgcaaaagggagaaaatggcatggatgagcatcacagcgttctggtggaattggaaggcgataatgccagactcgcagtactcaagcgaagcatcgaggtcacacacttcgcatatcccgctgtcaacctgccccctaaagtcatgacggcggtcatggaccagttactcattaagcgcgcaagtcccctttcagaagacatgcatgacccagatgcctgtgatgagggtaaaccagtggtcagtgatgagcagctaacccgatggctgggcaccgactctcccagggatttggaagagcgtcgcaagcttatgatggccgtggtgctggttaccgtagaactagagtgtctccgacgtttctttaccgattcagaaaccttgcgcaaactcgaagagaatctgcactacacttttagacacggctttgtgcggcaggcatgcaagatatctaacgtggaactcaccaacctggtttcctacatgggtattctgcatgagaatcgcctaggacaaagcgtgctgcacagcaccctgaagggggaagcccgccgtgattacatccgcgattgtgtctatctgtacctgtgccacacgtggcaaaccggcatgggtgtatggcagcaatgtttagaagaacagaacttgaaagagcttgacaagctcttacagaaatctcttaaggttctgtggacagggttcgacgagcgcaccgtcgcttccgacctggcagacctcatcttcccagagcgtctcagggttactttgcgaaacggattgcctgactttatgagccagagcatgcttaacaattttcgctctttcatcctggaacgctccggtatcctgcccgccacctgctgcgcactgccctccgactttgtgcctctcacctaccgcgagtgccccccgccgctatggagtcactgctacctgttccgtctggccaactatctctcctaccactcggatgtgatcgaggatgtgagcggagacggcttgctggagtgtcactgccgctgcaatctgtgcacgccccaccggtccctagcttgcaacccccagttgatgagcgaaacccagataataggcacctttgaattgcaaggccccagcagccaaggcgatgggtcttctcctgggcaaagtttaaaactgaccccgggactgtggacctccgcctacttgcgcaagtttgctccggaagattaccacccctatgaaatcaagttctatgaggaccaatcacagcctccaaaggccgaactttcggcctgcgtcatcacccagggggcaattctggcccaattgcaagccatccaaaaatcccgccaagaatttctactgaaaaagggtaagggggtctaccttgacccccagaccggcgaggaactcaacacaaggttccctcaggatgtcccaacgacgagaaaacaagaagttgaaggtgcagccgccgcccccagaagatatggaggaagattgggacagtcaggcagaggaggcggaggaggacagtctggaggacagtctggaggaagacagtttggaggaggaaaacgaggaggcagaggaggtggaagaagtaaccgccgacaaacagttatcctcggctgcggagacaagcaacagcgctaccatctccgctccgagtcgaggaacccggcggcgtcccagcagtagatgggacgagaccggacgcttcccgaacccaaccagcgcttccaagaccggtaagaaggatcggcagggatacaagtcctggcgggggcataagaatgccatcatctcctgcttgcatgagtgcgggggcaacatatccttcacgcggcgctacttgctattccaccatggggtgaactttccgcgcaatgttttgcattactaccgtcacctccacagcccctactatagccagcaaatcccggcagtctcgacagataaagacagcggcggcgacctccaacagaaaaccagcagcggcagttagaaaatacacaacaagtgcagcaacaggaggattaaagattacagccaacgagccagcgcaaacccgagagttaagaaatcggatctttccaaccctgtatgccatcttccagcagagtcggggtcaagagcaggaactgaaaataaaaaaccgatctctgcgttcgctcaccagaagttgtttgtatcacaagagcgaagatcaacttcagcgcactctcgaggacgccgaggctctcttcaacaagtactgcgcgctgactcttaaagagtaggcagcgaccgcgcttattcaaaaaaggcgggaattacatcatcctcgacatgagtaaagaaattcccacgccttacatgtggagttatcaaccccaaatgggattggcggcaggcgcctcccaggactactccacccgcatgaattggctcagcgccgggccttctatgatttctcgagttaatgatatacgcgcctaccgaaaccaaatacttttggaacagtcagctcttaccaccacgccccgccaacaccttaatcccagaaattggcccgccgccctagtgtaccaggaaagtcccgctcccaccactgtattacttcctcgagacgcccaggccgaagtccaaatgactaatgcaggtgcgcagttagctggcggctccaccctatgtcgtcacaggcctcggcataatataaaacgcctgatgatcagaggccgaggtatccagctcaacgacgagtcggtgagctctccgcttggtctacgaccagacggaatctttcagattgccggctgcgggagatcttccttcacccctcgtcaggctgttctgactttggaaagttcgtcttcgcaaccccgctcgggcggaatcgggaccgttcaatttgtggaggagtttactccctctgtctacttcaaccccttctccggatctcctgggcattacccggacgagttcataccgaacttcgacgcgattagcgagtcagtggacggctacgattgatgtctggtgacgcggctgagctatctcggctgcgacatctagaccactgccgccgctttcgctgctttgcccgggaactcattgagttcatctacttcgaactccccaaggatcaccctcaaggtccggcccacggagtgcggatttctatcgaaggcaaaatagactctcgcctgcaacgaattttctcccagcggcccgtgctgatcgagcgagaccagggaaacaccacggtttccatctactgcatttgtaatcaccccggattgcatgaaagcctttgctgtcttatgtgtactgagtttaataaaaactgaattaagactctcctacggactgccgcttcttcaacccggattttacaaccagaagaacgaaacttttcctgtcgtccaggactctgttaacttcacctttcctactcacaaactagaagctcaacgactacaccgcttttccagaagcattttccctactaatactactttcaaaaccggaggtgagctccaaggtcttcctacagaaaacccttgggtggaagcgggccttgtagtgctaggaattcttgcgggtgggcttgtgattattctttgctacctatacacaccttgcttcactttcttagtggtgttgtggtattggtttaaaaaatggggcccatactagtcttgcttgttttactttcgcttttggaaccgggttctgccaattacgatccatgtctagacttcgacccagaaaactgcacacttacttttgcacccgacacaagccgcatctgtggagttcatcgcctctcttacgaacttggcccccaacgacaaaaatttacctgcatggtgggaatcaaccccatagttatcacccagcaaagtggagatactaagggttgcattcactgctcctgcgattccatcgagtgcacctacaccctgctgaagaccctatgcggcctaagagacctgctaccaatgaattaaaaaatgattaataaaaaatcacttacttgaaatcagcaataaggtctctgttgaaattttctcccagcagcacctcacttccctcttcccaactctggtattctaaaccccgttcagcggcatactttctccatactttaaaggggatgtcaaattttagctcctctcctgtacccacaatcttcatgtctttcttcccagatgaccaagagagtccggctcagtgactccttcaaccctgtctacccctatgaagatgaaagcacctcccaacacccctttataaacccagggtttatttccccaaatggcttcacacaaagcccaaacggagttcttactttaaaatgtttaaccccactaacaaccacaggcggatctctacagctaaaagtgggagggggacttacagtggatgacaccaacggttttttgaaagaaaacataagtgccaccacaccactcgttaagactggtcactctataggtttaccactaggagccggattgggaacgaatgaaaataaactttgtatcaaattaggacaaggacttacattcaattcaaacaacatttgcattgatgacaatattaacaccttatggacaggagtcaaccccaccgaagccaactgtcaaatcatgaactccagtgaatctaatgattgcaaattaattctaacactagttaaaactggagcactagtcactgcatttgtttatgttataggagtatctaacaattttaatatgctaactacacacagaaatataaattttactgcagagctgtttttcgattctactggtaatttactaactagactctcatccctcaaaactccacttaatcataaatcaggacaaaacatggctactggtgccattactaatgctaaaggtttcatgcccagcacgactgcctatcctttcaatgataattctagagaaaaagaaaactacatttacggaacttgttactacacagctagtgatcgcactgcttttcccattgacatatctgtcatgcttaaccgaagagcaataaatgacgagacatcatattgtattcgtataacttggtcctggaacacaggagatgccccagaggtgcaaacctctgctacaaccctagtcacctccccatttaccttttactacatcagagaagacgactgacaaataaagtttgcgatcgccaggcccaccatgtgccaccagcagctggtcattagctggtttagcctcgtgttcctcgctagccctctggtggctatctgggagctcaagaaggatgtgtacgtcgtcgagctggattggtatcccgacgctcccggagaaatggtggtgctgacatgtgatacccccgaggaagacggcattacatggaccctcgatcagtcctccgaggtgctcggcagcggaaagaccctcaccattcaagtgaaggagtttggcgacgctggccagtatacatgccacaagggcggcgaagtgctgagccactctctgctgctgctgcacaagaaggaggatggcatctggagcacagacattctgaaggaccagaaagagcccaagaacaagacctttctgaggtgcgaggccaagaactacagcggaagattcacatgctggtggctgaccaccattagcaccgacctcaccttttccgtcaaaagctctagaggcagctccgatcctcaaggagtcacatgcggcgccgctacactgagcgccgaaagagtgaggggcgataacaaggagtacgaatactccgtggaatgccaagaggactccgcttgccccgccgccgaagaatctctgcccatcgaggtgatggtggatgccgtccataagctgaaatacgagaactacacaagcagcttcttcattagagatattatcaagcccgatccccccaagaatctgcagctcaagcctctgaagaattctagacaagtggaagtcagctgggaataccccgacacatggagcacaccccacagctacttctctctgaccttctgcgtgcaagtccaaggcaagtccaagagagagaagaaggatagagtcttcaccgacaaaacaagcgccacagtcatctgtagaaaaaatgccagcatcagcgtgagggcccaagacagatattattcctccagctggtccgaatgggcctccgtgccttgcagcggaggaggaggatccggaggaggcggatccggcggaggaggcagcagaaacctccccgtggccacccccgatcccggcatgtttccttgcctccaccactcccagaatctgctgagggccgtgagcaatatgctgcagaaggctaggcagacactggagttttacccttgcaccagcgaggagatcgaccacgaagacatcacaaaggacaagaccagcaccgtggaggcttgtctgcctctcgagctcaccaaaaatgaaagctgcctcaattccagagagaccagcttcatcaccaatggaagctgtctggcttctagaaagacaagcttcatgatggctctgtgcctcagcagcatctacgaggatctgaaaatgtatcaagtggagttcaagaccatgaacgccaagctgctcatggatcccaagagacagatcttcctcgaccaaaacatgctcgccgtgatcgatgagctgatgcaagctctgaactttaactccgagaccgtcccccaaaagagcagcctcgaggaacccgacttctacaagaccaagattaagctgtgcattctgctgcacgcctttaggattagagctgtgaccatcgatagggtcatgagctacctcaacgctagcggctccggagaaggaagaggctccctcctcacatgcggcgacgtcgaggagaaccccggccccgcccctagaagggccagaggatgtaggacactcggactccccgctctgctgctgctgctgctgctgagaccccccgctacaagaggcattacatgccccccccctatgtccgtcgagcatgccgatatctgggtcaagagctactccctctactccagagagaggtacatttgcaatagcggcttcaaaagaaaagctggcaccagctctctgaccgagtgcgtgctcaataaggccaccaacgtggcccactggaccaccccttccctcaaatgcattagagacgagcagaagctgatcagcgaagaggacctcgctgtgggccaagacacccaagaggtcatcgtcgtgccccattctctgcccttcaaggtcgtggtcatttccgccattctggctctggtggtcctcaccatcatttctctgatcattctgatcatgctgtggcagaaaaagcccagaggcagcggcgctaccaatttttctctgctgaagcaagccggcgacgtggaggagaatcccggccccgactggacatggaggatcctctttctcgtggctgccgctaccggcgcccacagcaactgggtcaacgtcattagcgatctcaaaaagatcgaggatctgatccagagcatgcacatcgatgctacactgtacaccgaatccgacgtgcatcccagctgcaaagtcaccgccatgaagtgctttctgctggaactccaagtgatttccctcgagtccggagacgctagcattcacgacaccgtcgaaaatctgattattctggccaacaactctctgtcctccaacggaaatgtgaccgagagcggctgcaaagagtgcgaggaactcgaggagaagaacattaaggagtttctgcagtccttcgtgcacatcgtgcagatgttcattaacacctcctaagctagcttgactgactgagatacagcgtaccttcagctcacagacatgataagatacattgatgagtttggacaaaccacaactagaatgcagtgaaaaaaatgctttatttgtgaaatttgtgatgctattgctttatttgtaaccattataagctgcaataaacaagttaacaacaacaattgcattcattttatgtttcaggttcagggggaggtgtgggaggttttttaaagcaagtaaaacctctacaaatgtggtagtcgtcagctatcctgcaggaacttgtttatttgaaaatcaattcacaaaatccgagtagttattttgcctcccccttcccatttaacagaatacaccaatctctccccacgcacagctttaaacatttggataccattagatatagacatggttttagattccacattccaaacagtttcagagcgagccaatctggggtcagtgatagataaaaatccatcgggatagtcttttaaagcgctttcacagtccaactgctgcggatgcgactccggagtctggatcacggtcatctggaagaagaacgatgggaatcataatccgaaaacggtatcggacgattgtgtctcatcaaacccacaagcagccgctgtctgcgtcgctccgtgcgactgctgtttatgggatcagggtccacagtgtcctgaagcatgattttaatagcccttaacatcaactttctggtgcgatgcgcgcagcaacgcattctgatttcactcaaatctttgcagtaggtacaacacattattacaatattgtttaataaaccataattaaaagcgctccagccaaaactcatatctgatataatcgcccctgcatgaccatcataccaaagtttaatataaattaaatgacgttccctcaaaaacacactacccacatacatgatctcttttggcatgtgcatattaacaatctgtctgtaccatggacaacgttggttaatcatgcaacccaatataaccttccggaaccacactgccaacaccgctcccccagccatgcattgaagtgaaccctgctgattacaatgacaatgaagaacccaattctctcgaccgtgaatcacttgagaatgaaaaatatctatagtggcacaacatagacataaatgcatgcatcttctcataatttttaactcctcaggatttagaaacatatcccagggaataggaagctcttgcagaacagtaaagctggcagaacaaggaagaccacgaacacaacttacactatgcatagtcatagtatcacaatctggcaacagcgggtggtcttcagtcatagaagctcgggtttcattttcctcacaacgtggtaactgggctctggtgtaagggtgatgtctggcgcatgatgtcgagcgtgcgcgcaaccttgtcataatggagttgcttcctgacattctcgtattttgtatagcaaaacgcggccctggcagaacacactcttcttcgccttctatcctgccgcttagcgtgttccgtgtgatagttcaagtacaaccacactcttaagttggtcaaaagaatgctggcttcagttgtaatcaaaactccatcgcatctaatcgttctgaggaaatcatccaagcaatgcaactggattgtgtttcaagcaggagaggagagggaagagacggaagaaccatgttaatttttattccaaacgatctcgcagtacttcaaattgtagatcgcgcagatggcatctctcgcccccactgtgttggtgaaaaagcacagctagatcaaaagaaatgcgattttcaaggtgctcaacggtggcttccagcaaagcctccacgcgcacatccaagaacaaaagaataccaaaagaaggagcattttctaactcctcaatcatcatattacattcctgcaccattcccagataattttcagctttccagccttgaattattcgtgtcagttcttgtggtaaatccaatccacacattacaaacaggtcccggagggcgccctccaccaccattcttaaacacaccctcataatgacaaaatatcttgctcctgtgtcacctgtagcgaattgagaatggcaacatcaattgacatgcccttggctctaagttcttctttaagttctagttgtaaaaactctctcatattatcaccaaactgcttagccagaagccccccgggaacaagagcaggggacgctacagtgcagtacaagcgcagacctccccaattggctccagcaaaaacaagattggaataagcatattgggaaccgccagtaatatcatcgaagttgctggaaatataatcaggcagagtttcttgtaaaaattgaataaaagaaaaatttgccaaaaaaacattcaaaacctctgggatgcaaatgcaataggttaccgcgctgcgctccaacattgttagttttgaattagtctgcaaaaataaaaaaaaaaacaagcgtcatatcatagtagcctgacgaacagatggataaatcagtctttccatcacaagacaagccacagggtctccagctcgaccctcgtaaaacctgtcatcatgattaaacaacagcaccgaaagttcctcgcggtgaccagcatgaataattcttgatgaagcatacaatccagacatgttagcatcagttaacgagaaaaaacagccaacatagcctttgggtataattatgcttaatcgtaagtatagcaaagccacccctcgcggatacaaagtaaaaggcacaggagaataaaaaatataattatttctctgctgctgttcaggcaacgtcgcccccggtccctctaaatacacatacaaagcctcatcagccatggcttaccagacaaagtacagcgggcacacaaagcacaagctctaaagtgactctccaacctctccacaatatatatatacacaagccctaaactgacgtaatgggagtaaagtgtaaaaaatcccgccaaacccaacacacaccccgaaactgcgtcaccagggaaaagtacagtttcacttccgcaatcccaacaggcgtaacttcctctttctcacggtacgtgatatcccactaacttgcaacgtcattttcccacggtcgcaccgccccttttagccgttaaccccacagccaatcaccacacgatccacactttttaaaatcacctcatttacatattggcaccattccatctataaggtatattatatagataga

SEQ ID NO: 221 - DNA, 35059 bp, Artificial Sequence
  Genome sequence of NG-786A virus
tctatctatataatataccttatagatggaatggtgccaatatgtaaatgaggtgattttaaaaagtgtggatcgtgtggtgattggctgtggggttaacggctaaaaggggcggtgcgaccgtgggaaaatgacgttttgtgggggtggagtttttttgcaagttgtcgcgggaaatgtgacgcataaaaaggcttttttctcacggaactacttagttttcccacggtatttaacaggaaatgaggtagttttgaccggatgcaagtgaaaattgttgattttcgcgcgaaaactgaatgaggaagtgtttttctgaataatgtggtatttatggcagggtggagtatttgttcagggccaggtagactttgacccattacgtggaggtttcgattaccgtgttttttacctgaatttccgcgtaccgtgtcaaagtcttctgtttttacgtaggtgtcagctgatcgctagggtatttatacctcagggtttgtgtcaagaggccactcttgagtgccagcgagaagagttttctcctctgcgccggcagtttaataataaaaaaatgagagatttgcgatttctgcctcaggaaataatctctgctgagactggaaatgaaatattggagcttgtggtgcacgccctgatgggagacgatccggagccacctgtgcagctttttgagcctcctacgcttcaggaactgtatgatttagaggtagagggatcggaggattctaatgaggaagctgtaaatggcttttttaccgattctatgcttttagctgctaatgaagggttagaattagatccgcctttggacacttttgatactccaggggtaattgtggaaagcggtacaggtgtaagaaaattacctgatttgagttccgtggactgtgatttgcactgctatgaagacgggtttcctccgagtgatgaggaggaccatgaaaaggagcagtccatgcagactgcagcgggtgagggagtgaaggctgccaatgttggttttcagttggattgcccggagcttcctggacatggctgtaagtcttgtgaatttcacaggaaaaatactggagtaaaggaactgttatgttcgctttgttatatgagaacgcactgccactttatttacagtaagtgtgtttaagttaaaatttaaaggaatatgctgtttttcacatgtatattgagtgtgagttttgtgcttcttattataggtcctgtgtctgatgctgatgaatcaccatctcctgattctactacctcacctcctgagattcaagcacctgttcctgtggacgtgcgcaagcccattcctgtgaagcttaagcctgggaaacgtccagcagtggaaaaacttgaggacttgttacagggtggggacggacctttggacttgagtacacggaaacgtccaagacaataagtgttccatatccgtgtttacttaaggtgacgtcaatatttgtgtgacagtgcaatgtaataaaaatatgttaactgttcactggtttttattgctttttgggcggggactcaggtatataagtagaagcagacctgtgtggttagctcataggagctggctttcatccatggaggtttgggccattttggaagaccttaggaagactaggcaactgttagagaacgcttcggacggagtctccggtttttggagattctggttcgctagtgaattagctagggtagtttttaggataaaacaggactataaacaagaatttgaaaagttgttggtagattgcccaggactttttgaagctcttaatttgggccatcaggttcactttaaagaaaaagttttatcagttttagacttttcaaccccaggtagaactgctgctgctgtggcttttcttacttttatattagataaatggatcccgcagactcatttcagcaggggatacgttttggatttcatagccacagcattgtggagaacatggaaggttcgcaagatgaggacaatcttaggttactggccagtgcagcctttgggtgtagcgggaatcctgaggcatccaccggtcatgccagcggttctggaggaggaacagcaagaggacaacccgagagccggcctggaccctccagtggaggaggcggagtagctgacttgtctcctgaactgcaacgggtgcttactggatctacgtccactggacgggataggggcgttaagagggagagggcatctagtggtactgatgctagatctgagttggctttaagtttaatgagtcgcagacgtcctgaaaccatttggtggcatgaggttcagaaagagggaagggatgaagtttctgtattgcaggagaaatattcactggaacaggtgaaaacatgttggttggagcctgaggatgattgggaggtggccattaaaaattatgccaagatagctttgaggcctgataaacagtataagattactagacggattaatatccggaatgcttgttacatatctggaaatggggctgaggtggtaatagatactcaagacaaggcagttattagatgctgcatgatggatatgtggcctggggtagtcggtatggaagcagtaacttttgtaaatgttaagtttaggggagatggttataatggaatagtgtttatggccaataccaaacttatattgcatggttgtagcttttttggtttcaacaatacctgtgtagatgcctggggacaggttagtgtacggggatgtagtttctatgcgtgttggattgccacagctggcagaaccaagagtcaattgtctctgaagaaatgcatatttcaaagatgtaacctgggcattctgaatgaaggcgaagcaagggtccgccactgcgcttctacagatactggatgttttattttgattaagggaaatgccagcgtaaagcataacatgatttgcggtgcttccgatgagaggccttatcaaatgctcacttgtgctggtgggcattgtaatatgctggctactgtgcatattgtttcccatcaacgcaaaaaatggcctgtttttgatcacaatgtgatgacgaagtgtaccatgcatgcaggtgggcgtagaggaatgtttatgccttaccagtgtaacatgaatcatgtgaaagtgttgttggaaccagatgccttttccagaatgagcctaacaggaatttttgacatgaacatgcaaatctggaagatcctgaggtatgatgatacgagatcgagggtacgcgcatgcgaatgcggaggcaagcatgccaggttccagccggtgtgtgtagatgtgactgaagatctcagaccggatcatttggttattgcccgcactggagcagagttcggatccagtggagaagaaactgactaaggtgagtattgggaaaactttggggtgggattttcagatggacagattgagtaaaaatttgttttttctgtcttgcagctgtcatgagtggaaacgcttcttttaaggggggagtcttcagcccttatctgacagggcgtctcccatcctgggcaggagttcgtcagaatgttatgggatctactgtggatggaagacccgtccaacccgccaattcttcaacgctgacctatgctactttaagttcttcacctttggacgcagctgcagctgccgccgccgcttctgttgccgctaacactgtgcttggaatgggttactatggaagcatcatggctaattccacttcctctaataacccttctaccctgactcaggacaagttacttgtccttttggcccagctggaggctttgacccaacgtctgggtgaactttctcagcaggtggtcgagttgcgagtacaaactgagtctgctgtcggcacggcaaagtctaaataaaaaaatcccagaatcaatgaataaataaacaagcttgttgttgatttaaaatcaagtgtttttatttcatttttcgcgcacggtatgccctagaccaccgatctctatcattgagaactcggtggattttttccaggatcctatagaggtgggattgaatgtttagatacatgggcattaggccgtctttggggtggagatagctccattgaagggattcatgctccggggtagtgttgtaaatcacccagtcataacaaggtcgcagtgcatggtgttgcacaatatcttttagaagtaggctgattgccacagataagcccttggtgtaggtgtttacaaaccggttgagctgggatgggtgcattcggggtgaaattatgtgcattttggattggatttttaagttggcaatattgccgccaagatcccgtcttgggttcatgttatgaaggaccaccaagacggtgtatccggtacatttaggaaatttatcgtgcagcttggatggaaaagcgtggaaaaatttggagacacccttgtgtcctccaagattttccatgcactcatccatgataatagcaatggggccgtgggcagcggcgcgggcaaacacgttccgtgggtctgacacatcatagttatgttcctgagttaaatcatcataagccattttaatgaatttggggcggagagtaccagattggggtatgaatgttccttcgggccccggagcatagttcccctcacagatttgcatttcccaagctttcagttccgagggtggaatcatgtccacctggggggctatgaaaaacaccgtttctggggcgggggtgattaattgtgatgatagcaaatttctgagcaattgagatttgccacatccggtggggccataaatgattccgattacgggttgcaggtggtagtttagggaacggcaactgccgtcttctcgaagcaagggggccacctcgttcatcatttcccttacatgcatattttcccgcaccaaatccattaggaggcgctctcctcctagtgatagaagttcttgtagtgaggaaaagtttttcagcggtttcagaccgtcagccatgggcattttggagagagtttgctgcaaaagttctagtctgttccacagttcagtgatgtgttctatggcatctcgatccagcagacctcctcgtttcgcgggtttggacggctcctggaatagggtatgagacgatgggcgtccagcgctgccagggttcggtccttccagggtctcagtgttcgagtcagggttgtttccgtcacagtgaaggggtgtgcgcctgcttgggcgcttgccagggtgcgcttcagactcatcctgctggtcgaaaacttctgtcgcttggcgccctgtatgtcggccaagtagcagtttaccatgagttcgtagttgagcgcctcggctgcgtggcctttggcgcggagcttacctttggaagttttcttgcataccgggcagtataggcatttcagcgcatacaacttgggcgcaaggaaaacggattctggggagtatgcatctgcgccgcaggaggcgcaaacagtttcacattccaccagccaggttaaatccggttcattggggtcaaaaacaagttttccgccatattttttgatgcgtttcttacctttggtctccatgagttcgtgtcctcgttgagtgacaaacaggctgtccgtgtccccgtagactgattttacaggcctcttctccagtggagtgcctcggtcttcttcgtacaggaactctgaccactctgatacaaaggcgcgcgtccaggccagcacaaaggaggctatgtgggaggggtagcgatcgttgtcaaccagggggtccaccttttccaaagtatgcaaacacatgtcaccctcttcaacatccaggaatgtgattggcttgtaggtgtatttcacgtgacctggggtccccgctgggggggtataaaagggggcggttctttgctcttcctcactgtcttccggatcgctgtccaggaacgtcagctgttggggtaggtattccctctcgaaggcgggcatgacctctgcactcaggttgtcagtttctaagaacgaggaggatttgatattgacagtgccggttgagatgcctttcatgaggttttcgtccatctggtcagaaaacacaatttttttattgtcaagtttggtggcaaatgatccatacagggcgttggataaaagtttggcaatggatcgcatggtttggttcttttccttgtccgcgcgctctttggcggcgatgttgagttggacatactcgcgtgccaggcacttccattcggggaagatagttgttaattcatctggcacgattctcacttgccaccctcgattatgcaaggtaattaaatccacactggtggccacctcgcctcgaaggggttcattggtccaacagagcctacctcctttcctagaacagaaagggggaagtgggtctagcataagttcatcgggagggtctgcatccatggtaaagattcccggaagtaaatccttatcaaaatagctgatgggagtggggtcatctaaggccatttgccattctcgagctgccagtgcgcgctcatatgggttaaggggactgccccatggcatgggatgggtgagtgcagaggcatacatgccacagatgtcatagacgtagatgggatcctcaaagatgcctatgtaggttggatagcatcgcccccctctgatacttgctcgcacatagtcatatagttcatgtgatggcgctagcagccccggacccaagttggtgcgattgggtttttctgttctgtagacgatctggcgaaagatggcgtgagaattggaagagatggtgggtctttgaaaaatgttgaaatgggcatgaggtagacctacagagtctctgacaaagtgggcataagattcttgaagcttggttaccagttcggcggtgacaagtacgtctagggcgcagtagtcaagtgtttcttgaatgatgtcataacctggttggtttttcttttcccacagttcgcggttgagaaggtattcttcgcgatccttccagtactcttctagcggaaacccgtctttgtctgcacggtaagatcctagcatgtagaactgattaactgccttgtaagggcagcagcccttctctacgggtagagagtatgcttgagcagcttttcgtagcgaagcgtgagtaagggcaaaggtgtctctgaccatgactttgaggaattggtatttgaagtcgatgtcgtcacaggctccctgttcccagagttggaagtctacccgtttcttgtaggcggggttgggcaaagcgaaagtaacatcattgaagagaatcttgccggccctgggcatgaaattgcgagtgatgcgaaaaggctgtggtacttccgctcggttattgataacctgggcagctaggacgatctcgtcgaaaccgttgatgttgtgtcctacgatgtataattctatgaaacgcggcgtgcctctgacgtgaggtagcttactgagctcatcaaaggttaggtctgtggggtcagataaggcgtagtgttcgagagcccattcgtgcaggtgaggattcgctttaaggaaggaggaccagaggtccactgccagtgctgtttgtaactggtcccggtactgacgaaaatgccgtccgactgccattttttctggggtgacgcaatagaaggtttgggggtcctgccgccagcgatcccacttgagttttatggcgaggtcataggcgatgttgacgagccgctggtctccagagagtttcatgaccagcatgaaggggattagctgcttgccaaaggaccccatccaggtgtaggtttccacatcgtaggtgagaaagagcctttctgtgcgaggatgagagccaatcgggaagaactggatctcctgccaccagttggaggaatggctgttgatgtgatggaagtagaactccctgcgacgcgccgagcattcatgcttgtgcttgtacagacggccgcagtagtcgcagcgttgcacgggttgtatctcgtgaatgagttgtacctggcttcccttgacgagaaatttcagtgggaagccgaggcctggcgattgtatctcgtgctttactatgttgtctgcatcggcctgttcatcttctgtctcgatggtggtcatgctgacgagccctcgcgggaggcaagtccagacctcggcgcggcaggggcggagctcgaggacgagagcgcgcaggctggagctgtccagggtcctgagacgctgcggactcaggttagtaggcagtgtcaggagattaacttgcatgatcttttggagggcgtgcgggaggttcagatagtacttgatctcaacgggtccgttggtggagatgtcgatggcttgcagggttccgtgtcccttgggcgctaccaccgtgcccttgtttttcattttggacggcggtggctctgttgcttcttgcatgtttagaagcggtgtcgagggcgcgcaccgggcggcaggggcggctcgggacccggcggcatggctggcagtggtacgtcggcgccgcgcgcgggtaggttctggtactgcgccctgagaagactcgcatgcgcgacgacgcggcggttgacatcctggatctgacgcctctgggtgaaagctaccggccccgtgagcttgaacctgaaagagagttcaacagaatcaatctcggtatcgttgacggcggcttgcctaaggatttcttgcacgtcaccagagttgtcctggtaggcgatctccgccatgaactgctcgatctcttcctcttgaagatctccgcggcccgctctctcgacggtggccgcgaggtcgttggagatgcgcccaatgagttgagagaatgcattcatgcccgcctcgttccagacgcggctgtagaccacggcccccacgggatctctcgcgcgcatgaccacctgggcgaggttgagctccacgtggcgggtgaagaccgcatagttgcataggcgctggaaaaggtagttgagtgtggtggcgatgtgctcggtgacgaagaaatacatgatccatcgtctcagcggcatctcgctgacatcgcccagagcttccaagcgctccatggcctcgtagaagtccacggcaaaattaaaaaactgggagtttcgcgcggacacggtcaactcctcttccagaagacggataagttcggcgatggtggtgcgcacctcgcgctcgaaagcccctgggatttcttcctcaatctcttcttcttccactaacatctcttcctcttcaggtggggctgcaggaggagggggaacgcggcgacgccggcggcgcacgggcagacggtcgatgaatctttcaatgacctctccgcggcggcggcgcatggtttcagtgacggcgcggccgttctcgcgcggtcgcagagtaaaaacaccgccgcgcatctccttaaagtggtgactgggaggttctccgtttgggagggagagggcgctgattatacattttattaattggcccgtagggactgcacgcagagatctgatcgtgtcaagatccacgggatctgaaaacctttcgacgaaagcgtctaaccagtcacagtcacaaggtaggctgagtacggcttcttgtgggcgggggtggttatgtgttcggtctgggtcttctgtttcttcttcatctcgggaaggtgagacgatgctgctggtgatgaaattaaagtaggcagttctaagacggcggatggtggcgaggagcaccaggtctttgggtccggcttgctggatacgcaggcgattggccattccccaagcattatcctgacatctagcaagatctttgtagtagtcttgcatgagccgttctacgggcacttcttcctcacccgttctgccatgcatacgtgtgagtccaaatccgcgcattggttgtaccagtgccaagtcagctacgactctttcggcgaggatggcttgctgtacttgggtaagggtggcttgaaagtcatcaaaatccacaaagcggtggtaagctcctgtattaatggtgtaagcacagttggccatgactgaccagttaactgtctggtgaccagggcgcacgagctcggtgtatttaaggcgcgaataggcgcgggtgtcaaagatgtaatcgttgcaggtgcgcaccagatactggtaccctataagaaaatgcggcggtggttggcggtagagaggccatcgttctgtagctggagcgccaggggcgaggtcttccaacataaggcggtgatagccgtagatgtacctggacatccaggtgattcctgcggcggtagtagaagcccgaggaaactcgcgtacgcggttccaaatgttgcgtagcggcatgaagtagttcattgtaggcacggtttgaccagtgaggcgcgcgcagtcattgatgctctatagacacggagaaaatgaaagcgttcagcgactcgactccgtagcctggaggaacgtgaacgggttgggtcgcggtgtaccccggttcgagacttgtactcgagccggccggagccgcggctaacgtggtattggcactcccgtctcgacccagcctacaaaaatccaggatacggaatcgagtcgttttgctggtttccgaatggcagggaagtgagtcctattttttttttttgccgctcagatgcatcccgtgctgcgacagatgcgcccccaacaacagcccccctcgcagcagcagcagcagcaatcacaaaaggctgtccctgcaactactgcaactgccgccgtgagcggtgcgggacagcccgcctatgatctggacttggaagagggcgaaggactggcacgtctaggtgcgccttcacccgagcggcatccgcgagttcaactgaaaaaagattctcgcgaggcgtatgtgccccaacagaacctatttagagacagaagcggcgaggagccggaggagatgcgagcttcccgctttaacgcgggtcgtgagctgcgtcacggtttggaccgaagacgagtgttgcgggacgaggatttcgaagttgatgaaatgacagggatcagtcctgccagggcacacgtggctgcagccaaccttgtatcggcttacgagcagacagtaaaggaagagcgtaacttccaaaagtcttttaataatcatgtgcgaaccctgattgcccgcgaagaagttacccttggtttgatgcatttgtgggatttgatggaagctatcattcagaaccctactagcaaacctctgaccgcccagctgtttctggtggtgcaacacagcagagacaatgaggctttcagagaggcgctgctgaacatcaccgaacccgaggggagatggttgtatgatcttatcaacattctacagagtatcatagtgcaggagcggagcctgggcctggccgagaaggtggctgccatcaattactcggttttgagcttgggaaaatattacgctcgcaaaatctacaagactccatacgttcccatagacaaggaggtgaagatagatgggttctacatgcgcatgacgctcaaggtcttgaccctgagcgatgatcttggggtgtatcgcaatgacagaatgcatcgcgcggttagcgccagcaggaggcgcgagttaagcgacagggaactgatgcacagtttgcaaagagctctgactggagctggaaccgagggtgagaattacttcgacatgggagctgacttgcagtggcagcctagtcgcagggctctgagcgccgcgacggcaggatgtgagcttccttacatagaagaggcggatgaaggcgaggaggaagagggcgagtacttggaagactgatggcacaacccgtgttttttgctagatggaacagcaagcaccggatcccgcaatgcgggcggcgctgcagagccagccgtccggcattaactcctcggacgattggacccaggccatgcaacgtatcatggcgttgacgactcgcaaccccgaagcctttagacagcaaccccaggccaaccgtctatcggccatcatggaagctgtagtgccttcccgctctaatcccactcatgagaaggtcctggccatcgtgaacgcgttggtggagaacaaagctattcgtccagatgaggccggactggtatacaacgctctcttagaacgcgtggctcgctacaacagtagcaatgtgcaaaccaatttggaccgtatgataacagatgtacgcgaagccgtgtctcagcgcgaaaggttccagcgtgatgccaacctgggttcgctggtggcgttaaatgctttcttgagtactcagcctgctaatgtgccgcgtggtcaacaggattatactaactttttaagtgctttgagactgatggtatcagaagtacctcagagcgaagtgtatcagtccggtcctgattacttctttcagactagcagacagggcttgcagacggtaaatctgagccaagcttttaaaaaccttaaaggtttgtggggagtgcatgccccggtaggagaaagagcaaccgtgtctagcttgttaactccgaactcccgcctattattactgttggtagctcctttcaccgacagcggtagcatcgaccgtaattcctatttgggttacctactaaacctgtatcgcgaagccatagggcaaagtcaggtggacgagcagacctatcaagaaattacccaagtcagtcgcgctttgggacaggaagacactggcagtttggaagccactctgaacttcttgcttaccaatcggtctcaaaagatccctcctcaatatgctcttactgcggaggaggagaggatccttagatatgtgcagcagagcgtgggattgtttctgatgcaagagggggcaactccgactgcagcactggacatgacagcgcgaaatatggagcccagcatgtatgccagtaaccgacctttcattaacaaactgctggactacttgcacagagctgccgctatgaactctgattatttcaccaatgccatcttaaacccgcactggctgcccccacctggtttctacacgggcgaatatgacatgcccgaccctaatgacggatttctgtgggacgacgtggacagcgatgttttttcacctctttctgatcatcgcacgtggaaaaaggaaggcggcgatagaatgcattcttctgcatcgctgtccggggtcatgggtgctaccgcggctgagcccgagtctgcaagtccttttcctagtctacccttttctctacacagtgtacgtagcagcgaagtgggtagaataagtcgcccgagtttaatgggcgaagaggagtatctaaacgattccttgctcagaccggcaagagaaaaaaatttcccaaacaatggaatagaaagtttggtggataaaatgagtagatggaagacttatgctcaggatcacagagacgagcctgggatcatggggattacaagtagagcgagccgtagacgccagcgccatgacagacagaggggtcttgtgtgggacgatgaggattcggccgatgatagcagcgtgctggacttgggtgggagaggaaggggcaacccgtttgctcatttgcgccctcgcttgggtggtatgttgtaaaaaaaaataaaaaaaaaactcaccaaggccatggcgacgagcgtacgttcgttcttctttattatctgtgtctagtataatgaggcgagtcgtgctaggcggagcggtggtgtatccggagggtcctcctccttcgtacgagagcgtgatgcagcagcagcaggcgacggcggtgatgcaatccccactggaggctccctttgtgcctccgcgatacctggcacctacggagggcagaaacagcattcgttattcggaactggcacctcagtacgataccaccaggttgtatctggtggacaacaagtcggcggacattgcttctctgaactatcagaatgaccacagcaacttcttgaccacggtggtgcaaaacaatgactttacccctacggaagccagcacccagaccattaactttgatgaacgatcgcggtggggcggtcagctaaagaccatcatgcatactaacatgccaaacgtgaacgagtatatgtttagtaacaagttcaaagcgcgtgtgatggtgtccagaaaacctcccgacggtgctgcagttggggatacttatgatcacaagcaggatattttgaaatatgagtggttcgagtttactttgccagaaggcaacttttcagttactatgactattgatttgatgaacaatgccatcatagataattacttgaaagtgggtagacagaatggagtgcttgaaagtgacattggtgttaagttcgacaccaggaacttcaagctgggatgggatcccgaaaccaagttgatcatgcctggagtgtatacgtatgaagccttccatcctgacattgtcttactgcctggctgcggagtggattttaccgagagtcgtttgagcaaccttcttggtatcagaaaaaaacagccatttcaagagggttttaagattttgtatgaagatttagaaggtggtaatattccggccctcttggatgtagatgcctatgagaacagtaagaaagaacaaaaagccaaaatagaagctgctacagctgctgcagaagctaaggcaaacatagttgccagcgactctacaagggttgctaacgctggagaggtcagaggagacaattttgcgccaacacctgttccgactgcagaatcattattggccgatgtgtctgaaggaacggacgtgaaactcactattcaacctgtagaaaaagatagtaagaatagaagctataatgtgttggaagacaaaatcaacacagcctatcgcagttggtatctttcgtacaattatggcgatcccgaaaaaggagtgcgttcctggacattgctcaccacctcagatgtcacctgcggagcagagcaggtctactggtcgcttccagacatgatgaaggatcctgtcactttccgctccactagacaagtcagtaactaccctgtggtgggtgcagagcttatgcccgtcttctcaaagagcttctacaacgaacaagctgtgtactcccagcagctccgccagtccacctcgcttacgcacgtcttcaaccgctttcctgagaaccagattttaatccgtccgccggcgcccaccattaccaccgtcagtgaaaacgttcctgctctcacagatcacgggaccctgccgttgcgcagcagtatccggggagtccaacgtgtgaccgttactgacgccagacgccgcacctgtccctacgtgtacaaggcactgggcatagtcgcaccgcgcgtcctttcaagccgcactttctaaaaaaaaaaaaaatgtccattcttatctcgcccagtaataacaccggttggggtctgcgcgctccaagcaagatgtacggaggcgcacgcaaacgttctacccaacatcctgtccgtgttcgcggacattttcgcgctccatggggcgccctcaagggccgcactcgcgttcgaaccaccgtcgatgatgtaatcgatcaggtggttgccgacgcccgtaattatactcctactgcgcctacatctactgtggatgcagttattgacagtgtagtggctgacgctcgcaactatgctcgacgtaagagccggcgaaggcgcattgccagacgccaccgagctaccactgccatgcgagccgcaagagctctgctacgaagagctagacgcgtggggcgaagagccatgcttagggcggccagacgtgcagcttcgggcgccagcgccggcaggtcccgcaggcaagcagccgctgtcgcagcggcgactattgccgacatggcccaatcgcgaagaggcaatgtatactgggtgcgtgacgctgccaccggtcaacgtgtacccgtgcgcacccgtccccctcgcacttagaagatactgagcagtctccgatgttgtgtcccagcggcgaggatgtccaagcgcaaatacaaggaagaaatgctgcaggttatcgcacctgaagtctacggccaaccgttgaaggatgaaaaaaaaccccgcaaaatcaagcgggttaaaaaggacaaaaaagaagaggaagatggcgatgatgggctggcggagtttgtgcgcgagtttgccccacggcgacgcgtgcaatggcgtgggcgcaaagttcgacatgtgttgagacctggaacttcggtggtctttacacccggcgagcgttcaagcgctacttttaagcgttcctatgatgaggtgtacggggatgatgatattcttgagcaggcggctgaccgattaggcgagtttgcttatggcaagcgtagtagaataacttccaaggatgagacagtgtcgatacccttggatcatggaaatcccacccctagtcttaaaccggtcactttgcagcaagtgttacccgtaactccgcgaacaggtgttaaacgcgaaggtgaagatttgtatcccactatgcaactgatggtacccaaacgccagaagttggaggacgttttggagaaagtaaaagtggatccagatattcaacctgaggttaaagtgagacccattaagcaggtagcgcctggtctgggggtacaaactgtagacattaagattcccactgaaagtatggaagtgcaaactgaacccgcaaagcctactgccacctccactgaagtgcaaacggatccatggatgcccatgcctattacaactgacgccgccggtcccactcgaagatcccgacgaaagtacggtccagcaagtctgttgatgcccaattatgttgtacacccatctattattcctactcctggttaccgaggcactcgctactatcgcagccgaaacagtacctcccgccgtcgccgcaagacacctgcaaatcgcagtcgtcgccgtagacgcacaagcaaaccgactcccggcgccctggtgcggcaagtgtaccgcaatggtagtgcggaacctttgacactgccgcgtgcgcgttaccatccgagtatcatcacttaatcaatgttgccgctgcctccttgcagatatggccctcacttgtcgccttcgcgttcccatcactggttaccgaggaagaaactcgcgccgtagaagagggatgttgggacgcggaatgcgacgctacaggcgacggcgtgctatccgcaagcaattgcggggtggttttttaccagccttaattccaattatcgctgctgcaattggcgcgataccaggcatagcttccgtggcggttcaggcctcgcaacgacattgacattggaaaaaaacgtataaataaaaaaaaaaaaatacaatggactctgacactcctggtcctgtgactatgttttcttagagatggaagacatcaatttttcatccttggctccgcgacacggcacgaagccgtacatgggcacctggagcgacatcggcacgagccaactgaacgggggcgccttcaattggagcagtatctggagcgggcttaaaaattttggctcaaccataaaaacatacgggaacaaagcttggaacagcagtacaggacaggcgcttagaaataaacttaaagaccagaacttccaacaaaaagtagtcgatgggatagcttccggcatcaatggagtggtagatttggctaaccaggctgtgcagaaaaagataaacagtcgtttggacccgccgccagcaaccccaggtgaaatgcaagtggaggaagaaattcctccgccagaaaaacgaggcgacaagcgtccgcgtcccgatttggaagagacgctggtgacgcgcgtagatgaaccgccttcttatgaggaagcaacgaagcttggaatgcccaccactagaccgatagccccaatggccaccggggtgatgaaaccttctcagttgcatcgacccgtcaccttggatttgccccctccccctgctgctactgctgtacccgcttctaagcctgtcgctgccccgaaaccagtcgccgtagccaggtcacgtcccgggggcgctcctcgtccaaatgcgcactggcaaaatactctgaacagcatcgtgggtctaggcgtgcaaagtgtaaaacgccgtcgctgcttttaattaaatatggagtagcgcttaacttgcctatctgtgtatatgtgtcattacacgccgtcacagcagcagaggaaaaaaggaagaggtcgtgcgtcgacgctgagttactttcaagatggccaccccatcgatgctgccccaatgggcatacatgcacatcgccggacaggatgcttcggagtacctgagtccgggtctggtgcagttcgcccgcgccacagacacctacttcaatctgggaaataagtttagaaatcccaccgtagcgccgacccacgatgtgaccaccgaccgtagccagcggctcatgttgcgcttcgtgcccgttgaccgggaggacaatacatactcttacaaagtgcggtacaccctggccgtgggcgacaacagagtgctggatatggccagcacgttctttgacattaggggtgtgttggacagaggtcccagtttcaaaccctattctggtacggcttacaactccctggctcctaaaggcgctccaaatacatctcagtggattgcagaaggtgtaaaaaatacaactggtgaggaacacgtaacagaagaggaaaccaatactactacttacacttttggcaatgctcctgtaaaagctgaagctgaaattacaaaagaaggactcccagtaggtttggaagtttcagatgaagaaagtaaaccgatttatgctgataaaacatatcagccagaacctcagctgggagatgaaacttggactgaccttgatggaaaaaccgaaaagtatggaggcagggctctcaaacccgatactaagatgaaaccatgctacgggtcctttgccaaacctactaatgtgaaaggcggtcaggcaaaacaaaaaacaacggagcagccaaatcagaaagtcgaatatgatatcgacatggagttttttgatgcggcatcgcagaaaacaaacttaagtcctaaaattgtcatgtatgcagaaaatgtaaatttggaaactccagacactcatgtagtgtacaaacctggaacagaagacacaagttccgaagctaatttgggacaacaatctatgcccaacagacccaactacattggcttcagagataactttattggacttatgtactataacagtactggtaacatgggggtgctggctggtcaagcgtctcagttaaatgcagtggttgacttgcaggacagaaacacagaactttcttaccaactcttgcttgactctctgggcgacagaaccagatactttagcatgtggaatcaggctgtggacagttatgatcctgatgtacgtgttattgaaaatcatggtgtggaagatgaacttcccaactactgttttccactggacggcataggtgttccaacaaccagttacaaatcaatagttccaaatggagacaatgcgcctaattggaaggaacctgaagtaaatggaacaagtgagatcggacagggtaatttgtttgccatggaaattaaccttcaagccaatctatggcgaagtttcctttattccaatgtggctctatatctcccagactcgtacaaatacaccccgtccaatgtcactcttccagaaaacaaaaacacctacgactacatgaacgggcgggtggtgccgccatctctagtagacacctatgtgaacattggtgccaggtggtctctggatgccatggacaatgtcaacccattcaaccaccaccgtaacgctggcttgcgttaccgatccatgcttctgggtaacggacgttatgtgcctttccacatacaagtgcctcaaaaattcttcgctgttaaaaacctgctgcttctcccaggctcctacacttatgagtggaactttaggaaggatgtgaacatggttctacagagttccctcggtaacgacctgcgggtagatggcgccagcatcagtttcacgagcatcaacctctatgctacttttttccccatggctcacaacaccgcttccacccttgaagccatgctgcggaatgacaccaatgatcagtcattcaacgactacctatctgcagctaacatgctctaccccattcctgccaatgcaaccaatattcccatttccattccttctcgcaactgggcggctttcagaggctggtcatttaccagactgaaaaccaaagaaactccctctttggggtctggatttgacccctactttgtctattctggttctattccctacctggatggtaccttctacctgaaccacacttttaagaaggtttccatcatgtttgactcttcagtgagctggcctggaaatgacaggttactatctcctaacgaatttgaaataaagcgcactgtggatggcgaaggctacaacgtagcccaatgcaacatgaccaaagactggttcttggtacagatgctcgccaactacaacatcggctatcagggcttctacattccagaaggatacaaagatcgcatgtattcatttttcagaaacttccagcccatgagcaggcaggtggttgatgaggtcaattacaaagacttcaaggccgtcgccataccctaccaacacaacaactctggctttgtgggttacatggctccgaccatgcgccaaggtcaaccctatcccgctaactatccctatccactcattggaacaactgccgtaaatagtgttacgcagaaaaagttcttgtgtgacagaaccatgtggcgcataccgttctcgagcaacttcatgtctatgggggcccttacagacttgggacagaatatgctctatgccaactcagctcatgctctggacatgacctttgaggtggatcccatggatgagcccaccctgctttatcttctcttcgaagttttcgacgtggtcagagtgcatcagccacaccgcggcatcatcgaggcagtctacctgcgtacaccgttctcggccggtaacgctaccacgtaagaagcttcttgcttcttgcaaatagcagctgcaaccatggcctgcggatcccaaaacggctccagcgagcaagagctcagagccattgtccaagacctgggttgcggaccctattttttgggaacctacgataagcgcttcccggggttcatggcccccgataagctcgcctgtgccattgtaaatacggccggacgtgagacggggggagagcactggttggctttcggttggaacccacgttctaacacctgctacctttttgatccttttggattctcggatgatcgtctcaaacagatttaccagtttgaatatgagggtctcctgcgccgcagcgctcttgctaccaaggaccgctgtattacgctggaaaaatctacccagaccgtgcagggtccccgttctgccgcctgcggacttttctgctgcatgttccttcacgcctttgtgcactggcctgaccgtcccatggacggaaaccccaccatgaaattgctaactggagtgccaaacaacatgcttcattctcctaaagtccagcccaccctgtgtgacaatcaaaaagcactctaccattttcttaatacccattcgccttattttcgctcccatcgtacacacatcgaaagggccactgcgttcgaccgtatggatgttcaataatgactcatgtaaacaacgtgttcaataaacatcactttatttttttacatgtatcaaggctctgcattacttatttatttacaagtcgaatgggttctgacgagaatcagaatgacccgcaggcagtgatacgttgcggaactgatacttgggttgccacttgaattcgggaatcaccaacttgggaaccggtatatcgggcaggatgtcactccacagctttctggtcagctgcaaagctccaagcaggtcaggagccgaaatcttgaaatcacaattaggaccagtgctttgagcgcgagagttgcggtacaccggattgcagcactgaaacaccatcagcgacggatgtctcacgcttgccagcacggtgggatctgcaatcatgcccacatccagatcttcagcattggcaatgctgaacggggtcatcttgcaggtctgcctacccatggcgggcacccaattaggcttgtggttgcaatcgcagtgcagggggatcagtatcatcttggcctgatcctgtctgattcctggatacacggctctcatgaaagcatcatattgcttgaaagcctgctgggctttactaccctcggtataaaacatcccgcaggacctgctcgaaaactggttagctgcacagccggcatcattcacacagcagcgggcgtcattgttagctatttgcaccacacttctgccccagcggttttgggtgattttggttcgctcgggattctcctttaaggctcgttgtccgttctcgctggccacatccatctcgataatctgctccttctgaatcataatattgccatgcaggcacttcagcttgccctcataatcattgcagccatgaggccacaacgcacagcctgtacattcccaattatggtgggcgatctgagaaaaagaatgtatcattccctgcagaaatcttcccatcatcgtgctcagtgtcttgtgactagtgaaagttaactggatgcctcggtgctcctcgtttacgtactggtgacagatgcgcttgtattgttcgtgttgctcaggcattagtttaaaagaggttctaagttcgttatccagcctgtacttctccatcagcagacacatcacttccatgcctttctcccaagcagacaccaggggcaagctaatcggattcttaacagtgcaggcagcagctcctttagccagagggtcatctttagcgatcttctcaatgcttcttttgccatccttctcaacgatgcgcacgggcgggtagctgaaacccactgctacaagttgcgcctcttctctttcttcttcgctgtcttgactgatgtcttgcatggggatatgtttggtcttccttggcttctttttggggggtatcggaggaggaggactgtcgctccgttccggagacagggaggattgtgacgtttcgctcaccattaccaactgactgtcggtagaagaacctgaccccacacggcgacaggtgtttctcttcgggggcagaggtggaggcgattgcgaagggctgcggtccgacctggaaggcggatgactggcagaaccccttccgcgttcgggggtgtgctccctgtggcggtcgcttaactgatttccttcgcggctggccattgtgttctcctaggcagagaaacaacagacatggaaactcagccattgctgtcaacatcgccacgagtgccatcacatctcgtcctcagcgacgaggaaaaggagcagagcttaagcattccaccgcccagtcctgccaccacctctaccctagaagataaggaggtcgacgcatctcatgacatgcagaataaaaaagcgaaagagtctgagacagacatcgagcaagacccgggctatgtgacaccggtggaacacgaggaagagttgaaacgctttctagagagagaggatgaaaactgcccaaaacaacgagcagataactatcaccaagatgctggaaatagggatcagaacaccgactacctcatagggcttgacggggaagacgcgctccttaaacatctagcaagacagtcgctcatagtcaaggatgcattattggacagaactgaagtgcccatcagtgtggaagagctcagccgcgcctacgagcttaacctcttttcacctcgtactccccccaaacgtcagccaaacggcacctgcgagccaaatcctcgcttaaacttttatccagcttttgctgtgccagaagtactggctacctatcacatcttttttaaaaatcaaaaaattccagtctcctgccgcgctaatcgcacccgcgccgatgccctactcaatctgggacctggttcacgcttacctgatatagcttccttggaagaggttccaaagatcttcgagggtctgggcaataatgagactcgggccgcaaatgctctgcaaaagggagaaaatggcatggatgagcatcacagcgttctggtggaattggaaggcgataatgccagactcgcagtactcaagcgaagcatcgaggtcacacacttcgcatatcccgctgtcaacctgccccctaaagtcatgacggcggtcatggaccagttactcattaagcgcgcaagtcccctttcagaagacatgcatgacccagatgcctgtgatgagggtaaaccagtggtcagtgatgagcagctaacccgatggctgggcaccgactctcccagggatttggaagagcgtcgcaagcttatgatggccgtggtgctggttaccgtagaactagagtgtctccgacgtttctttaccgattcagaaaccttgcgcaaactcgaagagaatctgcactacacttttagacacggctttgtgcggcaggcatgcaagatatctaacgtggaactcaccaacctggtttcctacatgggtattctgcatgagaatcgcctaggacaaagcgtgctgcacagcaccctgaagggggaagcccgccgtgattacatccgcgattgtgtctatctgtacctgtgccacacgtggcaaaccggcatgggtgtatggcagcaatgtttagaagaacagaacttgaaagagcttgacaagctcttacagaaatctcttaaggttctgtggacagggttcgacgagcgcaccgtcgcttccgacctggcagacctcatcttcccagagcgtctcagggttactttgcgaaacggattgcctgactttatgagccagagcatgcttaacaattttcgctctttcatcctggaacgctccggtatcctgcccgccacctgctgcgcactgccctccgactttgtgcctctcacctaccgcgagtgccccccgccgctatggagtcactgctacctgttccgtctggccaactatctctcctaccactcggatgtgatcgaggatgtgagcggagacggcttgctggagtgtcactgccgctgcaatctgtgcacgccccaccggtccctagcttgcaacccccagttgatgagcgaaacccagataataggcacctttgaattgcaaggccccagcagccaaggcgatgggtcttctcctgggcaaagtttaaaactgaccccgggactgtggacctccgcctacttgcgcaagtttgctccggaagattaccacccctatgaaatcaagttctatgaggaccaatcacagcctccaaaggccgaactttcggcctgcgtcatcacccagggggcaattctggcccaattgcaagccatccaaaaatcccgccaagaatttctactgaaaaagggtaagggggtctaccttgacccccagaccggcgaggaactcaacacaaggttccctcaggatgtcccaacgacgagaaaacaagaagttgaaggtgcagccgccgcccccagaagatatggaggaagattgggacagtcaggcagaggaggcggaggaggacagtctggaggacagtctggaggaagacagtttggaggaggaaaacgaggaggcagaggaggtggaagaagtaaccgccgacaaacagttatcctcggctgcggagacaagcaacagcgctaccatctccgctccgagtcgaggaacccggcggcgtcccagcagtagatgggacgagaccggacgcttcccgaacccaaccagcgcttccaagaccggtaagaaggatcggcagggatacaagtcctggcgggggcataagaatgccatcatctcctgcttgcatgagtgcgggggcaacatatccttcacgcggcgctacttgctattccaccatggggtgaactttccgcgcaatgttttgcattactaccgtcacctccacagcccctactatagccagcaaatcccggcagtctcgacagataaagacagcggcggcgacctccaacagaaaaccagcagcggcagttagaaaatacacaacaagtgcagcaacaggaggattaaagattacagccaacgagccagcgcaaacccgagagttaagaaatcggatctttccaaccctgtatgccatcttccagcagagtcggggtcaagagcaggaactgaaaataaaaaaccgatctctgcgttcgctcaccagaagttgtttgtatcacaagagcgaagatcaacttcagcgcactctcgaggacgccgaggctctcttcaacaagtactgcgcgctgactcttaaagagtaggcagcgaccgcgcttattcaaaaaaggcgggaattacatcatcctcgacatgagtaaagaaattcccacgccttacatgtggagttatcaaccccaaatgggattggcggcaggcgcctcccaggactactccacccgcatgaattggctcagcgccgggccttctatgatttctcgagttaatgatatacgcgcctaccgaaaccaaatacttttggaacagtcagctcttaccaccacgccccgccaacaccttaatcccagaaattggcccgccgccctagtgtaccaggaaagtcccgctcccaccactgtattacttcctcgagacgcccaggccgaagtccaaatgactaatgcaggtgcgcagttagctggcggctccaccctatgtcgtcacaggcctcggcataatataaaacgcctgatgatcagaggccgaggtatccagctcaacgacgagtcggtgagctctccgcttggtctacgaccagacggaatctttcagattgccggctgcgggagatcttccttcacccctcgtcaggctgttctgactttggaaagttcgtcttcgcaaccccgctcgggcggaatcgggaccgttcaatttgtggaggagtttactccctctgtctacttcaaccccttctccggatctcctgggcattacccggacgagttcataccgaacttcgacgcgattagcgagtcagtggacggctacgattgatgtctggtgacgcggctgagctatctcggctgcgacatctagaccactgccgccgctttcgctgctttgcccgggaactcattgagttcatctacttcgaactccccaaggatcaccctcaaggtccggcccacggagtgcggatttctatcgaaggcaaaatagactctcgcctgcaacgaattttctcccagcggcccgtgctgatcgagcgagaccagggaaacaccacggtttccatctactgcatttgtaatcaccccggattgcatgaaagcctttgctgtcttatgtgtactgagtttaataaaaactgaattaagactctcctacggactgccgcttcttcaacccggattttacaaccagaagaacgaaacttttcctgtcgtccaggactctgttaacttcacctttcctactcacaaactagaagctcaacgactacaccgcttttccagaagcattttccctactaatactactttcaaaaccggaggtgagctccaaggtcttcctacagaaaacccttgggtggaagcgggccttgtagtgctaggaattcttgcgggtgggcttgtgattattctttgctacctatacacaccttgcttcactttcttagtggtgttgtggtattggtttaaaaaatggggcccatactagtcttgcttgttttactttcgcttttggaaccgggttctgccaattacgatccatgtctagacttcgacccagaaaactgcacacttacttttgcacccgacacaagccgcatctgtggagttcatcgcctctcttacgaacttggcccccaacgacaaaaatttacctgcatggtgggaatcaaccccatagttatcacccagcaaagtggagatactaagggttgcattcactgctcctgcgattccatcgagtgcacctacaccctgctgaagaccctatgcggcctaagagacctgctaccaatgaattaaaaaatgattaataaaaaatcacttacttgaaatcagcaataaggtctctgttgaaattttctcccagcagcacctcacttccctcttcccaactctggtattctaaaccccgttcagcggcatactttctccatactttaaaggggatgtcaaattttagctcctctcctgtacccacaatcttcatgtctttcttcccagatgaccaagagagtccggctcagtgactccttcaaccctgtctacccctatgaagatgaaagcacctcccaacacccctttataaacccagggtttatttccccaaatggcttcacacaaagcccaaacggagttcttactttaaaatgtttaaccccactaacaaccacaggcggatctctacagctaaaagtgggagggggacttacagtggatgacaccaacggttttttgaaagaaaacataagtgccaccacaccactcgttaagactggtcactctataggtttaccactaggagccggattgggaacgaatgaaaataaactttgtatcaaattaggacaaggacttacattcaattcaaacaacatttgcattgatgacaatattaacaccttatggacaggagtcaaccccaccgaagccaactgtcaaatcatgaactccagtgaatctaatgattgcaaattaattctaacactagttaaaactggagcactagtcactgcatttgtttatgttataggagtatctaacaattttaatatgctaactacacacagaaatataaattttactgcagagctgtttttcgattctactggtaatttactaactagactctcatccctcaaaactccacttaatcataaatcaggacaaaacatggctactggtgccattactaatgctaaaggtttcatgcccagcacgactgcctatcctttcaatgataattctagagaaaaagaaaactacatttacggaacttgttactacacagctagtgatcgcactgcttttcccattgacatatctgtcatgcttaaccgaagagcaataaatgacgagacatcatattgtattcgtataacttggtcctggaacacaggagatgccccagaggtgcaaacctctgctacaaccctagtcacctccccatttaccttttactacatcagagaagacgactgacaaataaagtttgcgatcgccaggcccaccatgtgccaccagcagctggtcattagctggtttagcctcgtgttcctcgctagccctctggtggctatctgggagctcaagaaggatgtgtacgtcgtcgagctggattggtatcccgacgctcccggagaaatggtggtgctgacatgtgatacccccgaggaagacggcattacatggaccctcgatcagtcctccgaggtgctcggcagcggaaagaccctcaccattcaagtgaaggagtttggcgacgctggccagtatacatgccacaagggcggcgaagtgctgagccactctctgctgctgctgcacaagaaggaggatggcatctggagcacagacattctgaaggaccagaaagagcccaagaacaagacctttctgaggtgcgaggccaagaactacagcggaagattcacatgctggtggctgaccaccattagcaccgacctcaccttttccgtcaaaagctctagaggcagctccgatcctcaaggagtcacatgcggcgccgctacactgagcgccgaaagagtgaggggcgataacaaggagtacgaatactccgtggaatgccaagaggactccgcttgccccgccgccgaagaatctctgcccatcgaggtgatggtggatgccgtccataagctgaaatacgagaactacacaagcagcttcttcattagagatattatcaagcccgatccccccaagaatctgcagctcaagcctctgaagaattctagacaagtggaagtcagctgggaataccccgacacatggagcacaccccacagctacttctctctgaccttctgcgtgcaagtccaaggcaagtccaagagagagaagaaggatagagtcttcaccgacaaaacaagcgccacagtcatctgtagaaaaaatgccagcatcagcgtgagggcccaagacagatattattcctccagctggtccgaatgggcctccgtgccttgcagcggaggaggaggatccggaggaggcggatccggcggaggaggcagcagaaacctccccgtggccacccccgatcccggcatgtttccttgcctccaccactcccagaatctgctgagggccgtgagcaatatgctgcagaaggctaggcagacactggagttttacccttgcaccagcgaggagatcgaccacgaagacatcacaaaggacaagaccagcaccgtggaggcttgtctgcctctcgagctcaccaaaaatgaaagctgcctcaattccagagagaccagcttcatcaccaatggaagctgtctggcttctagaaagacaagcttcatgatggctctgtgcctcagcagcatctacgaggatctgaaaatgtatcaagtggagttcaagaccatgaacgccaagctgctcatggatcccaagagacagatcttcctcgaccaaaacatgctcgccgtgatcgatgagctgatgcaagctctgaactttaactccgagaccgtcccccaaaagagcagcctcgaggaacccgacttctacaagaccaagattaagctgtgcattctgctgcacgcctttaggattagagctgtgaccatcgatagggtcatgagctacctcaacgctagcggctccggagaaggaagaggctccctcctcacatgcggcgacgtcgaggagaaccccggccccgcccctagaagggccagaggatgtaggacactcggactccccgctctgctgctgctgctgctgctgagaccccccgctacaagaggcattacatgccccccccctatgtccgtcgagcatgccgatatctgggtcaagagctactccctctactccagagagaggtacatttgcaatagcggcttcaaaagaaaagctggcaccagctctctgaccgagtgcgtgctcaataaggccaccaacgtggcccactggaccaccccttccctcaaatgcattagagacggcagcggcgctaccaatttttctctgctgaagcaagccggcgacgtggaggagaatcccggccccgactggacatggaggatcctctttctcgtggctgccgctaccggcgcccacagcaactgggtcaacgtcattagcgatctcaaaaagatcgaggatctgatccagagcatgcacatcgatgctacactgtacaccgaatccgacgtgcatcccagctgcaaagtcaccgccatgaagtgctttctgctggaactccaagtgatttccctcgagtccggagacgctagcattcacgacaccgtcgaaaatctgattattctggccaacaactctctgtcctccaacggaaatgtgaccgagagcggctgcaaagagtgcgaggaactcgaggagaagaacattaaggagtttctgcagtccttcgtgcacatcgtgcagatgttcattaacacctcctaagctagcttgactgactgagatacagcgtaccttcagctcacagacatgataagatacattgatgagtttggacaaaccacaactagaatgcagtgaaaaaaatgctttatttgtgaaatttgtgatgctattgctttatttgtaaccattataagctgcaataaacaagttaacaacaacaattgcattcattttatgtttcaggttcagggggaggtgtgggaggttttttaaagcaagtaaaacctctacaaatgtggtagtcgtcagctatcctgcaggaacttgtttatttgaaaatcaattcacaaaatccgagtagttattttgcctcccccttcccatttaacagaatacaccaatctctccccacgcacagctttaaacatttggataccattagatatagacatggttttagattccacattccaaacagtttcagagcgagccaatctggggtcagtgatagataaaaatccatcgggatagtcttttaaagcgctttcacagtccaactgctgcggatgcgactccggagtctggatcacggtcatctggaagaagaacgatgggaatcataatccgaaaacggtatcggacgattgtgtctcatcaaacccacaagcagccgctgtctgcgtcgctccgtgcgactgctgtttatgggatcagggtccacagtgtcctgaagcatgattttaatagcccttaacatcaactttctggtgcgatgcgcgcagcaacgcattctgatttcactcaaatctttgcagtaggtacaacacattattacaatattgtttaataaaccataattaaaagcgctccagccaaaactcatatctgatataatcgcccctgcatgaccatcataccaaagtttaatataaattaaatgacgttccctcaaaaacacactacccacatacatgatctcttttggcatgtgcatattaacaatctgtctgtaccatggacaacgttggttaatcatgcaacccaatataaccttccggaaccacactgccaacaccgctcccccagccatgcattgaagtgaaccctgctgattacaatgacaatgaagaacccaattctctcgaccgtgaatcacttgagaatgaaaaatatctatagtggcacaacatagacataaatgcatgcatcttctcataatttttaactcctcaggatttagaaacatatcccagggaataggaagctcttgcagaacagtaaagctggcagaacaaggaagaccacgaacacaacttacactatgcatagtcatagtatcacaatctggcaacagcgggtggtcttcagtcatagaagctcgggtttcattttcctcacaacgtggtaactgggctctggtgtaagggtgatgtctggcgcatgatgtcgagcgtgcgcgcaaccttgtcataatggagttgcttcctgacattctcgtattttgtatagcaaaacgcggccctggcagaacacactcttcttcgccttctatcctgccgcttagcgtgttccgtgtgatagttcaagtacaaccacactcttaagttggtcaaaagaatgctggcttcagttgtaatcaaaactccatcgcatctaatcgttctgaggaaatcatccaagcaatgcaactggattgtgtttcaagcaggagaggagagggaagagacggaagaaccatgttaatttttattccaaacgatctcgcagtacttcaaattgtagatcgcgcagatggcatctctcgcccccactgtgttggtgaaaaagcacagctagatcaaaagaaatgcgattttcaaggtgctcaacggtggcttccagcaaagcctccacgcgcacatccaagaacaaaagaataccaaaagaaggagcattttctaactcctcaatcatcatattacattcctgcaccattcccagataattttcagctttccagccttgaattattcgtgtcagttcttgtggtaaatccaatccacacattacaaacaggtcccggagggcgccctccaccaccattcttaaacacaccctcataatgacaaaatatcttgctcctgtgtcacctgtagcgaattgagaatggcaacatcaattgacatgcccttggctctaagttcttctttaagttctagttgtaaaaactctctcatattatcaccaaactgcttagccagaagccccccgggaacaagagcaggggacgctacagtgcagtacaagcgcagacctccccaattggctccagcaaaaacaagattggaataagcatattgggaaccgccagtaatatcatcgaagttgctggaaatataatcaggcagagtttcttgtaaaaattgaataaaagaaaaatttgccaaaaaaacattcaaaacctctgggatgcaaatgcaataggttaccgcgctgcgctccaacattgttagttttgaattagtctgcaaaaataaaaaaaaaaacaagcgtcatatcatagtagcctgacgaacagatggataaatcagtctttccatcacaagacaagccacagggtctccagctcgaccctcgtaaaacctgtcatcatgattaaacaacagcaccgaaagttcctcgcggtgaccagcatgaataattcttgatgaagcatacaatccagacatgttagcatcagttaacgagaaaaaacagccaacatagcctttgggtataattatgcttaatcgtaagtatagcaaagccacccctcgcggatacaaagtaaaaggcacaggagaataaaaaatataattatttctctgctgctgttcaggcaacgtcgcccccggtccctctaaatacacatacaaagcctcatcagccatggcttaccagacaaagtacagcgggcacacaaagcacaagctctaaagtgactctccaacctctccacaatatatatatacacaagccctaaactgacgtaatgggagtaaagtgtaaaaaatcccgccaaacccaacacacaccccgaaactgcgtcaccagggaaaagtacagtttcacttccgcaatcccaacaggcgtaacttcctctttctcacggtacgtgatatcccactaacttgcaacgtcattttcccacggtcgcaccgccccttttagccgttaaccccacagccaatcaccacacgatccacactttttaaaatcacctcatttacatattggcaccattccatctataaggtatattatatagataga

SEQ ID NO: 222 - DNA, 34984 bp, Artificial Sequence
  Genome sequence of NG-787 virus
tctatctatataatataccttatagatggaatggtgccaatatgtaaatgaggtgattttaaaaagtgtggatcgtgtggtgattggctgtggggttaacggctaaaaggggcggtgcgaccgtgggaaaatgacgttttgtgggggtggagtttttttgcaagttgtcgcgggaaatgtgacgcataaaaaggcttttttctcacggaactacttagttttcccacggtatttaacaggaaatgaggtagttttgaccggatgcaagtgaaaattgttgattttcgcgcgaaaactgaatgaggaagtgtttttctgaataatgtggtatttatggcagggtggagtatttgttcagggccaggtagactttgacccattacgtggaggtttcgattaccgtgttttttacctgaatttccgcgtaccgtgtcaaagtcttctgtttttacgtaggtgtcagctgatcgctagggtatttatacctcagggtttgtgtcaagaggccactcttgagtgccagcgagaagagttttctcctctgcgccggcagtttaataataaaaaaatgagagatttgcgatttctgcctcaggaaataatctctgctgagactggaaatgaaatattggagcttgtggtgcacgccctgatgggagacgatccggagccacctgtgcagctttttgagcctcctacgcttcaggaactgtatgatttagaggtagagggatcggaggattctaatgaggaagctgtaaatggcttttttaccgattctatgcttttagctgctaatgaagggttagaattagatccgcctttggacacttttgatactccaggggtaattgtggaaagcggtacaggtgtaagaaaattacctgatttgagttccgtggactgtgatttgcactgctatgaagacgggtttcctccgagtgatgaggaggaccatgaaaaggagcagtccatgcagactgcagcgggtgagggagtgaaggctgccaatgttggttttcagttggattgcccggagcttcctggacatggctgtaagtcttgtgaatttcacaggaaaaatactggagtaaaggaactgttatgttcgctttgttatatgagaacgcactgccactttatttacagtaagtgtgtttaagttaaaatttaaaggaatatgctgtttttcacatgtatattgagtgtgagttttgtgcttcttattataggtcctgtgtctgatgctgatgaatcaccatctcctgattctactacctcacctcctgagattcaagcacctgttcctgtggacgtgcgcaagcccattcctgtgaagcttaagcctgggaaacgtccagcagtggaaaaacttgaggacttgttacagggtggggacggacctttggacttgagtacacggaaacgtccaagacaataagtgttccatatccgtgtttacttaaggtgacgtcaatatttgtgtgacagtgcaatgtaataaaaatatgttaactgttcactggtttttattgctttttgggcggggactcaggtatataagtagaagcagacctgtgtggttagctcataggagctggctttcatccatggaggtttgggccattttggaagaccttaggaagactaggcaactgttagagaacgcttcggacggagtctccggtttttggagattctggttcgctagtgaattagctagggtagtttttaggataaaacaggactataaacaagaatttgaaaagttgttggtagattgcccaggactttttgaagctcttaatttgggccatcaggttcactttaaagaaaaagttttatcagttttagacttttcaaccccaggtagaactgctgctgctgtggcttttcttacttttatattagataaatggatcccgcagactcatttcagcaggggatacgttttggatttcatagccacagcattgtggagaacatggaaggttcgcaagatgaggacaatcttaggttactggccagtgcagcctttgggtgtagcgggaatcctgaggcatccaccggtcatgccagcggttctggaggaggaacagcaagaggacaacccgagagccggcctggaccctccagtggaggaggcggagtagctgacttgtctcctgaactgcaacgggtgcttactggatctacgtccactggacgggataggggcgttaagagggagagggcatctagtggtactgatgctagatctgagttggctttaagtttaatgagtcgcagacgtcctgaaaccatttggtggcatgaggttcagaaagagggaagggatgaagtttctgtattgcaggagaaatattcactggaacaggtgaaaacatgttggttggagcctgaggatgattgggaggtggccattaaaaattatgccaagatagctttgaggcctgataaacagtataagattactagacggattaatatccggaatgcttgttacatatctggaaatggggctgaggtggtaatagatactcaagacaaggcagttattagatgctgcatgatggatatgtggcctggggtagtcggtatggaagcagtaacttttgtaaatgttaagtttaggggagatggttataatggaatagtgtttatggccaataccaaacttatattgcatggttgtagcttttttggtttcaacaatacctgtgtagatgcctggggacaggttagtgtacggggatgtagtttctatgcgtgttggattgccacagctggcagaaccaagagtcaattgtctctgaagaaatgcatatttcaaagatgtaacctgggcattctgaatgaaggcgaagcaagggtccgccactgcgcttctacagatactggatgttttattttgattaagggaaatgccagcgtaaagcataacatgatttgcggtgcttccgatgagaggccttatcaaatgctcacttgtgctggtgggcattgtaatatgctggctactgtgcatattgtttcccatcaacgcaaaaaatggcctgtttttgatcacaatgtgatgacgaagtgtaccatgcatgcaggtgggcgtagaggaatgtttatgccttaccagtgtaacatgaatcatgtgaaagtgttgttggaaccagatgccttttccagaatgagcctaacaggaatttttgacatgaacatgcaaatctggaagatcctgaggtatgatgatacgagatcgagggtacgcgcatgcgaatgcggaggcaagcatgccaggttccagccggtgtgtgtagatgtgactgaagatctcagaccggatcatttggttattgcccgcactggagcagagttcggatccagtggagaagaaactgactaaggtgagtattgggaaaactttggggtgggattttcagatggacagattgagtaaaaatttgttttttctgtcttgcagctgtcatgagtggaaacgcttcttttaaggggggagtcttcagcccttatctgacagggcgtctcccatcctgggcaggagttcgtcagaatgttatgggatctactgtggatggaagacccgtccaacccgccaattcttcaacgctgacctatgctactttaagttcttcacctttggacgcagctgcagctgccgccgccgcttctgttgccgctaacactgtgcttggaatgggttactatggaagcatcatggctaattccacttcctctaataacccttctaccctgactcaggacaagttacttgtccttttggcccagctggaggctttgacccaacgtctgggtgaactttctcagcaggtggtcgagttgcgagtacaaactgagtctgctgtcggcacggcaaagtctaaataaaaaaatcccagaatcaatgaataaataaacaagcttgttgttgatttaaaatcaagtgtttttatttcatttttcgcgcacggtatgccctagaccaccgatctctatcattgagaactcggtggattttttccaggatcctatagaggtgggattgaatgtttagatacatgggcattaggccgtctttggggtggagatagctccattgaagggattcatgctccggggtagtgttgtaaatcacccagtcataacaaggtcgcagtgcatggtgttgcacaatatcttttagaagtaggctgattgccacagataagcccttggtgtaggtgtttacaaaccggttgagctgggatgggtgcattcggggtgaaattatgtgcattttggattggatttttaagttggcaatattgccgccaagatcccgtcttgggttcatgttatgaaggaccaccaagacggtgtatccggtacatttaggaaatttatcgtgcagcttggatggaaaagcgtggaaaaatttggagacacccttgtgtcctccaagattttccatgcactcatccatgataatagcaatggggccgtgggcagcggcgcgggcaaacacgttccgtgggtctgacacatcatagttatgttcctgagttaaatcatcataagccattttaatgaatttggggcggagagtaccagattggggtatgaatgttccttcgggccccggagcatagttcccctcacagatttgcatttcccaagctttcagttccgagggtggaatcatgtccacctggggggctatgaaaaacaccgtttctggggcgggggtgattaattgtgatgatagcaaatttctgagcaattgagatttgccacatccggtggggccataaatgattccgattacgggttgcaggtggtagtttagggaacggcaactgccgtcttctcgaagcaagggggccacctcgttcatcatttcccttacatgcatattttcccgcaccaaatccattaggaggcgctctcctcctagtgatagaagttcttgtagtgaggaaaagtttttcagcggtttcagaccgtcagccatgggcattttggagagagtttgctgcaaaagttctagtctgttccacagttcagtgatgtgttctatggcatctcgatccagcagacctcctcgtttcgcgggtttggacggctcctggaatagggtatgagacgatgggcgtccagcgctgccagggttcggtccttccagggtctcagtgttcgagtcagggttgtttccgtcacagtgaaggggtgtgcgcctgcttgggcgcttgccagggtgcgcttcagactcatcctgctggtcgaaaacttctgtcgcttggcgccctgtatgtcggccaagtagcagtttaccatgagttcgtagttgagcgcctcggctgcgtggcctttggcgcggagcttacctttggaagttttcttgcataccgggcagtataggcatttcagcgcatacaacttgggcgcaaggaaaacggattctggggagtatgcatctgcgccgcaggaggcgcaaacagtttcacattccaccagccaggttaaatccggttcattggggtcaaaaacaagttttccgccatattttttgatgcgtttcttacctttggtctccatgagttcgtgtcctcgttgagtgacaaacaggctgtccgtgtccccgtagactgattttacaggcctcttctccagtggagtgcctcggtcttcttcgtacaggaactctgaccactctgatacaaaggcgcgcgtccaggccagcacaaaggaggctatgtgggaggggtagcgatcgttgtcaaccagggggtccaccttttccaaagtatgcaaacacatgtcaccctcttcaacatccaggaatgtgattggcttgtaggtgtatttcacgtgacctggggtccccgctgggggggtataaaagggggcggttctttgctcttcctcactgtcttccggatcgctgtccaggaacgtcagctgttggggtaggtattccctctcgaaggcgggcatgacctctgcactcaggttgtcagtttctaagaacgaggaggatttgatattgacagtgccggttgagatgcctttcatgaggttttcgtccatctggtcagaaaacacaatttttttattgtcaagtttggtggcaaatgatccatacagggcgttggataaaagtttggcaatggatcgcatggtttggttcttttccttgtccgcgcgctctttggcggcgatgttgagttggacatactcgcgtgccaggcacttccattcggggaagatagttgttaattcatctggcacgattctcacttgccaccctcgattatgcaaggtaattaaatccacactggtggccacctcgcctcgaaggggttcattggtccaacagagcctacctcctttcctagaacagaaagggggaagtgggtctagcataagttcatcgggagggtctgcatccatggtaaagattcccggaagtaaatccttatcaaaatagctgatgggagtggggtcatctaaggccatttgccattctcgagctgccagtgcgcgctcatatgggttaaggggactgccccatggcatgggatgggtgagtgcagaggcatacatgccacagatgtcatagacgtagatgggatcctcaaagatgcctatgtaggttggatagcatcgcccccctctgatacttgctcgcacatagtcatatagttcatgtgatggcgctagcagccccggacccaagttggtgcgattgggtttttctgttctgtagacgatctggcgaaagatggcgtgagaattggaagagatggtgggtctttgaaaaatgttgaaatgggcatgaggtagacctacagagtctctgacaaagtgggcataagattcttgaagcttggttaccagttcggcggtgacaagtacgtctagggcgcagtagtcaagtgtttcttgaatgatgtcataacctggttggtttttcttttcccacagttcgcggttgagaaggtattcttcgcgatccttccagtactcttctagcggaaacccgtctttgtctgcacggtaagatcctagcatgtagaactgattaactgccttgtaagggcagcagcccttctctacgggtagagagtatgcttgagcagcttttcgtagcgaagcgtgagtaagggcaaaggtgtctctgaccatgactttgaggaattggtatttgaagtcgatgtcgtcacaggctccctgttcccagagttggaagtctacccgtttcttgtaggcggggttgggcaaagcgaaagtaacatcattgaagagaatcttgccggccctgggcatgaaattgcgagtgatgcgaaaaggctgtggtacttccgctcggttattgataacctgggcagctaggacgatctcgtcgaaaccgttgatgttgtgtcctacgatgtataattctatgaaacgcggcgtgcctctgacgtgaggtagcttactgagctcatcaaaggttaggtctgtggggtcagataaggcgtagtgttcgagagcccattcgtgcaggtgaggattcgctttaaggaaggaggaccagaggtccactgccagtgctgtttgtaactggtcccggtactgacgaaaatgccgtccgactgccattttttctggggtgacgcaatagaaggtttgggggtcctgccgccagcgatcccacttgagttttatggcgaggtcataggcgatgttgacgagccgctggtctccagagagtttcatgaccagcatgaaggggattagctgcttgccaaaggaccccatccaggtgtaggtttccacatcgtaggtgagaaagagcctttctgtgcgaggatgagagccaatcgggaagaactggatctcctgccaccagttggaggaatggctgttgatgtgatggaagtagaactccctgcgacgcgccgagcattcatgcttgtgcttgtacagacggccgcagtagtcgcagcgttgcacgggttgtatctcgtgaatgagttgtacctggcttcccttgacgagaaatttcagtgggaagccgaggcctggcgattgtatctcgtgctttactatgttgtctgcatcggcctgttcatcttctgtctcgatggtggtcatgctgacgagccctcgcgggaggcaagtccagacctcggcgcggcaggggcggagctcgaggacgagagcgcgcaggctggagctgtccagggtcctgagacgctgcggactcaggttagtaggcagtgtcaggagattaacttgcatgatcttttggagggcgtgcgggaggttcagatagtacttgatctcaacgggtccgttggtggagatgtcgatggcttgcagggttccgtgtcccttgggcgctaccaccgtgcccttgtttttcattttggacggcggtggctctgttgcttcttgcatgtttagaagcggtgtcgagggcgcgcaccgggcggcaggggcggctcgggacccggcggcatggctggcagtggtacgtcggcgccgcgcgcgggtaggttctggtactgcgccctgagaagactcgcatgcgcgacgacgcggcggttgacatcctggatctgacgcctctgggtgaaagctaccggccccgtgagcttgaacctgaaagagagttcaacagaatcaatctcggtatcgttgacggcggcttgcctaaggatttcttgcacgtcaccagagttgtcctggtaggcgatctccgccatgaactgctcgatctcttcctcttgaagatctccgcggcccgctctctcgacggtggccgcgaggtcgttggagatgcgcccaatgagttgagagaatgcattcatgcccgcctcgttccagacgcggctgtagaccacggcccccacgggatctctcgcgcgcatgaccacctgggcgaggttgagctccacgtggcgggtgaagaccgcatagttgcataggcgctggaaaaggtagttgagtgtggtggcgatgtgctcggtgacgaagaaatacatgatccatcgtctcagcggcatctcgctgacatcgcccagagcttccaagcgctccatggcctcgtagaagtccacggcaaaattaaaaaactgggagtttcgcgcggacacggtcaactcctcttccagaagacggataagttcggcgatggtggtgcgcacctcgcgctcgaaagcccctgggatttcttcctcaatctcttcttcttccactaacatctcttcctcttcaggtggggctgcaggaggagggggaacgcggcgacgccggcggcgcacgggcagacggtcgatgaatctttcaatgacctctccgcggcggcggcgcatggtttcagtgacggcgcggccgttctcgcgcggtcgcagagtaaaaacaccgccgcgcatctccttaaagtggtgactgggaggttctccgtttgggagggagagggcgctgattatacattttattaattggcccgtagggactgcacgcagagatctgatcgtgtcaagatccacgggatctgaaaacctttcgacgaaagcgtctaaccagtcacagtcacaaggtaggctgagtacggcttcttgtgggcgggggtggttatgtgttcggtctgggtcttctgtttcttcttcatctcgggaaggtgagacgatgctgctggtgatgaaattaaagtaggcagttctaagacggcggatggtggcgaggagcaccaggtctttgggtccggcttgctggatacgcaggcgattggccattccccaagcattatcctgacatctagcaagatctttgtagtagtcttgcatgagccgttctacgggcacttcttcctcacccgttctgccatgcatacgtgtgagtccaaatccgcgcattggttgtaccagtgccaagtcagctacgactctttcggcgaggatggcttgctgtacttgggtaagggtggcttgaaagtcatcaaaatccacaaagcggtggtaagctcctgtattaatggtgtaagcacagttggccatgactgaccagttaactgtctggtgaccagggcgcacgagctcggtgtatttaaggcgcgaataggcgcgggtgtcaaagatgtaatcgttgcaggtgcgcaccagatactggtaccctataagaaaatgcggcggtggttggcggtagagaggccatcgttctgtagctggagcgccaggggcgaggtcttccaacataaggcggtgatagccgtagatgtacctggacatccaggtgattcctgcggcggtagtagaagcccgaggaaactcgcgtacgcggttccaaatgttgcgtagcggcatgaagtagttcattgtaggcacggtttgaccagtgaggcgcgcgcagtcattgatgctctatagacacggagaaaatgaaagcgttcagcgactcgactccgtagcctggaggaacgtgaacgggttgggtcgcggtgtaccccggttcgagacttgtactcgagccggccggagccgcggctaacgtggtattggcactcccgtctcgacccagcctacaaaaatccaggatacggaatcgagtcgttttgctggtttccgaatggcagggaagtgagtcctattttttttttttgccgctcagatgcatcccgtgctgcgacagatgcgcccccaacaacagcccccctcgcagcagcagcagcagcaatcacaaaaggctgtccctgcaactactgcaactgccgccgtgagcggtgcgggacagcccgcctatgatctggacttggaagagggcgaaggactggcacgtctaggtgcgccttcacccgagcggcatccgcgagttcaactgaaaaaagattctcgcgaggcgtatgtgccccaacagaacctatttagagacagaagcggcgaggagccggaggagatgcgagcttcccgctttaacgcgggtcgtgagctgcgtcacggtttggaccgaagacgagtgttgcgggacgaggatttcgaagttgatgaaatgacagggatcagtcctgccagggcacacgtggctgcagccaaccttgtatcggcttacgagcagacagtaaaggaagagcgtaacttccaaaagtcttttaataatcatgtgcgaaccctgattgcccgcgaagaagttacccttggtttgatgcatttgtgggatttgatggaagctatcattcagaaccctactagcaaacctctgaccgcccagctgtttctggtggtgcaacacagcagagacaatgaggctttcagagaggcgctgctgaacatcaccgaacccgaggggagatggttgtatgatcttatcaacattctacagagtatcatagtgcaggagcggagcctgggcctggccgagaaggtggctgccatcaattactcggttttgagcttgggaaaatattacgctcgcaaaatctacaagactccatacgttcccatagacaaggaggtgaagatagatgggttctacatgcgcatgacgctcaaggtcttgaccctgagcgatgatcttggggtgtatcgcaatgacagaatgcatcgcgcggttagcgccagcaggaggcgcgagttaagcgacagggaactgatgcacagtttgcaaagagctctgactggagctggaaccgagggtgagaattacttcgacatgggagctgacttgcagtggcagcctagtcgcagggctctgagcgccgcgacggcaggatgtgagcttccttacatagaagaggcggatgaaggcgaggaggaagagggcgagtacttggaagactgatggcacaacccgtgttttttgctagatggaacagcaagcaccggatcccgcaatgcgggcggcgctgcagagccagccgtccggcattaactcctcggacgattggacccaggccatgcaacgtatcatggcgttgacgactcgcaaccccgaagcctttagacagcaaccccaggccaaccgtctatcggccatcatggaagctgtagtgccttcccgctctaatcccactcatgagaaggtcctggccatcgtgaacgcgttggtggagaacaaagctattcgtccagatgaggccggactggtatacaacgctctcttagaacgcgtggctcgctacaacagtagcaatgtgcaaaccaatttggaccgtatgataacagatgtacgcgaagccgtgtctcagcgcgaaaggttccagcgtgatgccaacctgggttcgctggtggcgttaaatgctttcttgagtactcagcctgctaatgtgccgcgtggtcaacaggattatactaactttttaagtgctttgagactgatggtatcagaagtacctcagagcgaagtgtatcagtccggtcctgattacttctttcagactagcagacagggcttgcagacggtaaatctgagccaagcttttaaaaaccttaaaggtttgtggggagtgcatgccccggtaggagaaagagcaaccgtgtctagcttgttaactccgaactcccgcctattattactgttggtagctcctttcaccgacagcggtagcatcgaccgtaattcctatttgggttacctactaaacctgtatcgcgaagccatagggcaaagtcaggtggacgagcagacctatcaagaaattacccaagtcagtcgcgctttgggacaggaagacactggcagtttggaagccactctgaacttcttgcttaccaatcggtctcaaaagatccctcctcaatatgctcttactgcggaggaggagaggatccttagatatgtgcagcagagcgtgggattgtttctgatgcaagagggggcaactccgactgcagcactggacatgacagcgcgaaatatggagcccagcatgtatgccagtaaccgacctttcattaacaaactgctggactacttgcacagagctgccgctatgaactctgattatttcaccaatgccatcttaaacccgcactggctgcccccacctggtttctacacgggcgaatatgacatgcccgaccctaatgacggatttctgtgggacgacgtggacagcgatgttttttcacctctttctgatcatcgcacgtggaaaaaggaaggcggcgatagaatgcattcttctgcatcgctgtccggggtcatgggtgctaccgcggctgagcccgagtctgcaagtccttttcctagtctacccttttctctacacagtgtacgtagcagcgaagtgggtagaataagtcgcccgagtttaatgggcgaagaggagtatctaaacgattccttgctcagaccggcaagagaaaaaaatttcccaaacaatggaatagaaagtttggtggataaaatgagtagatggaagacttatgctcaggatcacagagacgagcctgggatcatggggattacaagtagagcgagccgtagacgccagcgccatgacagacagaggggtcttgtgtgggacgatgaggattcggccgatgatagcagcgtgctggacttgggtgggagaggaaggggcaacccgtttgctcatttgcgccctcgcttgggtggtatgttgtaaaaaaaaataaaaaaaaaactcaccaaggccatggcgacgagcgtacgttcgttcttctttattatctgtgtctagtataatgaggcgagtcgtgctaggcggagcggtggtgtatccggagggtcctcctccttcgtacgagagcgtgatgcagcagcagcaggcgacggcggtgatgcaatccccactggaggctccctttgtgcctccgcgatacctggcacctacggagggcagaaacagcattcgttattcggaactggcacctcagtacgataccaccaggttgtatctggtggacaacaagtcggcggacattgcttctctgaactatcagaatgaccacagcaacttcttgaccacggtggtgcaaaacaatgactttacccctacggaagccagcacccagaccattaactttgatgaacgatcgcggtggggcggtcagctaaagaccatcatgcatactaacatgccaaacgtgaacgagtatatgtttagtaacaagttcaaagcgcgtgtgatggtgtccagaaaacctcccgacggtgctgcagttggggatacttatgatcacaagcaggatattttgaaatatgagtggttcgagtttactttgccagaaggcaacttttcagttactatgactattgatttgatgaacaatgccatcatagataattacttgaaagtgggtagacagaatggagtgcttgaaagtgacattggtgttaagttcgacaccaggaacttcaagctgggatgggatcccgaaaccaagttgatcatgcctggagtgtatacgtatgaagccttccatcctgacattgtcttactgcctggctgcggagtggattttaccgagagtcgtttgagcaaccttcttggtatcagaaaaaaacagccatttcaagagggttttaagattttgtatgaagatttagaaggtggtaatattccggccctcttggatgtagatgcctatgagaacagtaagaaagaacaaaaagccaaaatagaagctgctacagctgctgcagaagctaaggcaaacatagttgccagcgactctacaagggttgctaacgctggagaggtcagaggagacaattttgcgccaacacctgttccgactgcagaatcattattggccgatgtgtctgaaggaacggacgtgaaactcactattcaacctgtagaaaaagatagtaagaatagaagctataatgtgttggaagacaaaatcaacacagcctatcgcagttggtatctttcgtacaattatggcgatcccgaaaaaggagtgcgttcctggacattgctcaccacctcagatgtcacctgcggagcagagcaggtctactggtcgcttccagacatgatgaaggatcctgtcactttccgctccactagacaagtcagtaactaccctgtggtgggtgcagagcttatgcccgtcttctcaaagagcttctacaacgaacaagctgtgtactcccagcagctccgccagtccacctcgcttacgcacgtcttcaaccgctttcctgagaaccagattttaatccgtccgccggcgcccaccattaccaccgtcagtgaaaacgttcctgctctcacagatcacgggaccctgccgttgcgcagcagtatccggggagtccaacgtgtgaccgttactgacgccagacgccgcacctgtccctacgtgtacaaggcactgggcatagtcgcaccgcgcgtcctttcaagccgcactttctaaaaaaaaaaaaaatgtccattcttatctcgcccagtaataacaccggttggggtctgcgcgctccaagcaagatgtacggaggcgcacgcaaacgttctacccaacatcctgtccgtgttcgcggacattttcgcgctccatggggcgccctcaagggccgcactcgcgttcgaaccaccgtcgatgatgtaatcgatcaggtggttgccgacgcccgtaattatactcctactgcgcctacatctactgtggatgcagttattgacagtgtagtggctgacgctcgcaactatgctcgacgtaagagccggcgaaggcgcattgccagacgccaccgagctaccactgccatgcgagccgcaagagctctgctacgaagagctagacgcgtggggcgaagagccatgcttagggcggccagacgtgcagcttcgggcgccagcgccggcaggtcccgcaggcaagcagccgctgtcgcagcggcgactattgccgacatggcccaatcgcgaagaggcaatgtatactgggtgcgtgacgctgccaccggtcaacgtgtacccgtgcgcacccgtccccctcgcacttagaagatactgagcagtctccgatgttgtgtcccagcggcgaggatgtccaagcgcaaatacaaggaagaaatgctgcaggttatcgcacctgaagtctacggccaaccgttgaaggatgaaaaaaaaccccgcaaaatcaagcgggttaaaaaggacaaaaaagaagaggaagatggcgatgatgggctggcggagtttgtgcgcgagtttgccccacggcgacgcgtgcaatggcgtgggcgcaaagttcgacatgtgttgagacctggaacttcggtggtctttacacccggcgagcgttcaagcgctacttttaagcgttcctatgatgaggtgtacggggatgatgatattcttgagcaggcggctgaccgattaggcgagtttgcttatggcaagcgtagtagaataacttccaaggatgagacagtgtcgatacccttggatcatggaaatcccacccctagtcttaaaccggtcactttgcagcaagtgttacccgtaactccgcgaacaggtgttaaacgcgaaggtgaagatttgtatcccactatgcaactgatggtacccaaacgccagaagttggaggacgttttggagaaagtaaaagtggatccagatattcaacctgaggttaaagtgagacccattaagcaggtagcgcctggtctgggggtacaaactgtagacattaagattcccactgaaagtatggaagtgcaaactgaacccgcaaagcctactgccacctccactgaagtgcaaacggatccatggatgcccatgcctattacaactgacgccgccggtcccactcgaagatcccgacgaaagtacggtccagcaagtctgttgatgcccaattatgttgtacacccatctattattcctactcctggttaccgaggcactcgctactatcgcagccgaaacagtacctcccgccgtcgccgcaagacacctgcaaatcgcagtcgtcgccgtagacgcacaagcaaaccgactcccggcgccctggtgcggcaagtgtaccgcaatggtagtgcggaacctttgacactgccgcgtgcgcgttaccatccgagtatcatcacttaatcaatgttgccgctgcctccttgcagatatggccctcacttgtcgccttcgcgttcccatcactggttaccgaggaagaaactcgcgccgtagaagagggatgttgggacgcggaatgcgacgctacaggcgacggcgtgctatccgcaagcaattgcggggtggttttttaccagccttaattccaattatcgctgctgcaattggcgcgataccaggcatagcttccgtggcggttcaggcctcgcaacgacattgacattggaaaaaaacgtataaataaaaaaaaaaaaatacaatggactctgacactcctggtcctgtgactatgttttcttagagatggaagacatcaatttttcatccttggctccgcgacacggcacgaagccgtacatgggcacctggagcgacatcggcacgagccaactgaacgggggcgccttcaattggagcagtatctggagcgggcttaaaaattttggctcaaccataaaaacatacgggaacaaagcttggaacagcagtacaggacaggcgcttagaaataaacttaaagaccagaacttccaacaaaaagtagtcgatgggatagcttccggcatcaatggagtggtagatttggctaaccaggctgtgcagaaaaagataaacagtcgtttggacccgccgccagcaaccccaggtgaaatgcaagtggaggaagaaattcctccgccagaaaaacgaggcgacaagcgtccgcgtcccgatttggaagagacgctggtgacgcgcgtagatgaaccgccttcttatgaggaagcaacgaagcttggaatgcccaccactagaccgatagccccaatggccaccggggtgatgaaaccttctcagttgcatcgacccgtcaccttggatttgccccctccccctgctgctactgctgtacccgcttctaagcctgtcgctgccccgaaaccagtcgccgtagccaggtcacgtcccgggggcgctcctcgtccaaatgcgcactggcaaaatactctgaacagcatcgtgggtctaggcgtgcaaagtgtaaaacgccgtcgctgcttttaattaaatatggagtagcgcttaacttgcctatctgtgtatatgtgtcattacacgccgtcacagcagcagaggaaaaaaggaagaggtcgtgcgtcgacgctgagttactttcaagatggccaccccatcgatgctgccccaatgggcatacatgcacatcgccggacaggatgcttcggagtacctgagtccgggtctggtgcagttcgcccgcgccacagacacctacttcaatctgggaaataagtttagaaatcccaccgtagcgccgacccacgatgtgaccaccgaccgtagccagcggctcatgttgcgcttcgtgcccgttgaccgggaggacaatacatactcttacaaagtgcggtacaccctggccgtgggcgacaacagagtgctggatatggccagcacgttctttgacattaggggtgtgttggacagaggtcccagtttcaaaccctattctggtacggcttacaactccctggctcctaaaggcgctccaaatacatctcagtggattgcagaaggtgtaaaaaatacaactggtgaggaacacgtaacagaagaggaaaccaatactactacttacacttttggcaatgctcctgtaaaagctgaagctgaaattacaaaagaaggactcccagtaggtttggaagtttcagatgaagaaagtaaaccgatttatgctgataaaacatatcagccagaacctcagctgggagatgaaacttggactgaccttgatggaaaaaccgaaaagtatggaggcagggctctcaaacccgatactaagatgaaaccatgctacgggtcctttgccaaacctactaatgtgaaaggcggtcaggcaaaacaaaaaacaacggagcagccaaatcagaaagtcgaatatgatatcgacatggagttttttgatgcggcatcgcagaaaacaaacttaagtcctaaaattgtcatgtatgcagaaaatgtaaatttggaaactccagacactcatgtagtgtacaaacctggaacagaagacacaagttccgaagctaatttgggacaacaatctatgcccaacagacccaactacattggcttcagagataactttattggacttatgtactataacagtactggtaacatgggggtgctggctggtcaagcgtctcagttaaatgcagtggttgacttgcaggacagaaacacagaactttcttaccaactcttgcttgactctctgggcgacagaaccagatactttagcatgtggaatcaggctgtggacagttatgatcctgatgtacgtgttattgaaaatcatggtgtggaagatgaacttcccaactactgttttccactggacggcataggtgttccaacaaccagttacaaatcaatagttccaaatggagacaatgcgcctaattggaaggaacctgaagtaaatggaacaagtgagatcggacagggtaatttgtttgccatggaaattaaccttcaagccaatctatggcgaagtttcctttattccaatgtggctctatatctcccagactcgtacaaatacaccccgtccaatgtcactcttccagaaaacaaaaacacctacgactacatgaacgggcgggtggtgccgccatctctagtagacacctatgtgaacattggtgccaggtggtctctggatgccatggacaatgtcaacccattcaaccaccaccgtaacgctggcttgcgttaccgatccatgcttctgggtaacggacgttatgtgcctttccacatacaagtgcctcaaaaattcttcgctgttaaaaacctgctgcttctcccaggctcctacacttatgagtggaactttaggaaggatgtgaacatggttctacagagttccctcggtaacgacctgcgggtagatggcgccagcatcagtttcacgagcatcaacctctatgctacttttttccccatggctcacaacaccgcttccacccttgaagccatgctgcggaatgacaccaatgatcagtcattcaacgactacctatctgcagctaacatgctctaccccattcctgccaatgcaaccaatattcccatttccattccttctcgcaactgggcggctttcagaggctggtcatttaccagactgaaaaccaaagaaactccctctttggggtctggatttgacccctactttgtctattctggttctattccctacctggatggtaccttctacctgaaccacacttttaagaaggtttccatcatgtttgactcttcagtgagctggcctggaaatgacaggttactatctcctaacgaatttgaaataaagcgcactgtggatggcgaaggctacaacgtagcccaatgcaacatgaccaaagactggttcttggtacagatgctcgccaactacaacatcggctatcagggcttctacattccagaaggatacaaagatcgcatgtattcatttttcagaaacttccagcccatgagcaggcaggtggttgatgaggtcaattacaaagacttcaaggccgtcgccataccctaccaacacaacaactctggctttgtgggttacatggctccgaccatgcgccaaggtcaaccctatcccgctaactatccctatccactcattggaacaactgccgtaaatagtgttacgcagaaaaagttcttgtgtgacagaaccatgtggcgcataccgttctcgagcaacttcatgtctatgggggcccttacagacttgggacagaatatgctctatgccaactcagctcatgctctggacatgacctttgaggtggatcccatggatgagcccaccctgctttatcttctcttcgaagttttcgacgtggtcagagtgcatcagccacaccgcggcatcatcgaggcagtctacctgcgtacaccgttctcggccggtaacgctaccacgtaagaagcttcttgcttcttgcaaatagcagctgcaaccatggcctgcggatcccaaaacggctccagcgagcaagagctcagagccattgtccaagacctgggttgcggaccctattttttgggaacctacgataagcgcttcccggggttcatggcccccgataagctcgcctgtgccattgtaaatacggccggacgtgagacggggggagagcactggttggctttcggttggaacccacgttctaacacctgctacctttttgatccttttggattctcggatgatcgtctcaaacagatttaccagtttgaatatgagggtctcctgcgccgcagcgctcttgctaccaaggaccgctgtattacgctggaaaaatctacccagaccgtgcagggtccccgttctgccgcctgcggacttttctgctgcatgttccttcacgcctttgtgcactggcctgaccgtcccatggacggaaaccccaccatgaaattgctaactggagtgccaaacaacatgcttcattctcctaaagtccagcccaccctgtgtgacaatcaaaaagcactctaccattttcttaatacccattcgccttattttcgctcccatcgtacacacatcgaaagggccactgcgttcgaccgtatggatgttcaataatgactcatgtaaacaacgtgttcaataaacatcactttatttttttacatgtatcaaggctctgcattacttatttatttacaagtcgaatgggttctgacgagaatcagaatgacccgcaggcagtgatacgttgcggaactgatacttgggttgccacttgaattcgggaatcaccaacttgggaaccggtatatcgggcaggatgtcactccacagctttctggtcagctgcaaagctccaagcaggtcaggagccgaaatcttgaaatcacaattaggaccagtgctttgagcgcgagagttgcggtacaccggattgcagcactgaaacaccatcagcgacggatgtctcacgcttgccagcacggtgggatctgcaatcatgcccacatccagatcttcagcattggcaatgctgaacggggtcatcttgcaggtctgcctacccatggcgggcacccaattaggcttgtggttgcaatcgcagtgcagggggatcagtatcatcttggcctgatcctgtctgattcctggatacacggctctcatgaaagcatcatattgcttgaaagcctgctgggctttactaccctcggtataaaacatcccgcaggacctgctcgaaaactggttagctgcacagccggcatcattcacacagcagcgggcgtcattgttagctatttgcaccacacttctgccccagcggttttgggtgattttggttcgctcgggattctcctttaaggctcgttgtccgttctcgctggccacatccatctcgataatctgctccttctgaatcataatattgccatgcaggcacttcagcttgccctcataatcattgcagccatgaggccacaacgcacagcctgtacattcccaattatggtgggcgatctgagaaaaagaatgtatcattccctgcagaaatcttcccatcatcgtgctcagtgtcttgtgactagtgaaagttaactggatgcctcggtgctcctcgtttacgtactggtgacagatgcgcttgtattgttcgtgttgctcaggcattagtttaaaagaggttctaagttcgttatccagcctgtacttctccatcagcagacacatcacttccatgcctttctcccaagcagacaccaggggcaagctaatcggattcttaacagtgcaggcagcagctcctttagccagagggtcatctttagcgatcttctcaatgcttcttttgccatccttctcaacgatgcgcacgggcgggtagctgaaacccactgctacaagttgcgcctcttctctttcttcttcgctgtcttgactgatgtcttgcatggggatatgtttggtcttccttggcttctttttggggggtatcggaggaggaggactgtcgctccgttccggagacagggaggattgtgacgtttcgctcaccattaccaactgactgtcggtagaagaacctgaccccacacggcgacaggtgtttctcttcgggggcagaggtggaggcgattgcgaagggctgcggtccgacctggaaggcggatgactggcagaaccccttccgcgttcgggggtgtgctccctgtggcggtcgcttaactgatttccttcgcggctggccattgtgttctcctaggcagagaaacaacagacatggaaactcagccattgctgtcaacatcgccacgagtgccatcacatctcgtcctcagcgacgaggaaaaggagcagagcttaagcattccaccgcccagtcctgccaccacctctaccctagaagataaggaggtcgacgcatctcatgacatgcagaataaaaaagcgaaagagtctgagacagacatcgagcaagacccgggctatgtgacaccggtggaacacgaggaagagttgaaacgctttctagagagagaggatgaaaactgcccaaaacaacgagcagataactatcaccaagatgctggaaatagggatcagaacaccgactacctcatagggcttgacggggaagacgcgctccttaaacatctagcaagacagtcgctcatagtcaaggatgcattattggacagaactgaagtgcccatcagtgtggaagagctcagccgcgcctacgagcttaacctcttttcacctcgtactccccccaaacgtcagccaaacggcacctgcgagccaaatcctcgcttaaacttttatccagcttttgctgtgccagaagtactggctacctatcacatcttttttaaaaatcaaaaaattccagtctcctgccgcgctaatcgcacccgcgccgatgccctactcaatctgggacctggttcacgcttacctgatatagcttccttggaagaggttccaaagatcttcgagggtctgggcaataatgagactcgggccgcaaatgctctgcaaaagggagaaaatggcatggatgagcatcacagcgttctggtggaattggaaggcgataatgccagactcgcagtactcaagcgaagcatcgaggtcacacacttcgcatatcccgctgtcaacctgccccctaaagtcatgacggcggtcatggaccagttactcattaagcgcgcaagtcccctttcagaagacatgcatgacccagatgcctgtgatgagggtaaaccagtggtcagtgatgagcagctaacccgatggctgggcaccgactctcccagggatttggaagagcgtcgcaagcttatgatggccgtggtgctggttaccgtagaactagagtgtctccgacgtttctttaccgattcagaaaccttgcgcaaactcgaagagaatctgcactacacttttagacacggctttgtgcggcaggcatgcaagatatctaacgtggaactcaccaacctggtttcctacatgggtattctgcatgagaatcgcctaggacaaagcgtgctgcacagcaccctgaagggggaagcccgccgtgattacatccgcgattgtgtctatctgtacctgtgccacacgtggcaaaccggcatgggtgtatggcagcaatgtttagaagaacagaacttgaaagagcttgacaagctcttacagaaatctcttaaggttctgtggacagggttcgacgagcgcaccgtcgcttccgacctggcagacctcatcttcccagagcgtctcagggttactttgcgaaacggattgcctgactttatgagccagagcatgcttaacaattttcgctctttcatcctggaacgctccggtatcctgcccgccacctgctgcgcactgccctccgactttgtgcctctcacctaccgcgagtgccccccgccgctatggagtcactgctacctgttccgtctggccaactatctctcctaccactcggatgtgatcgaggatgtgagcggagacggcttgctggagtgtcactgccgctgcaatctgtgcacgccccaccggtccctagcttgcaacccccagttgatgagcgaaacccagataataggcacctttgaattgcaaggccccagcagccaaggcgatgggtcttctcctgggcaaagtttaaaactgaccccgggactgtggacctccgcctacttgcgcaagtttgctccggaagattaccacccctatgaaatcaagttctatgaggaccaatcacagcctccaaaggccgaactttcggcctgcgtcatcacccagggggcaattctggcccaattgcaagccatccaaaaatcccgccaagaatttctactgaaaaagggtaagggggtctaccttgacccccagaccggcgaggaactcaacacaaggttccctcaggatgtcccaacgacgagaaaacaagaagttgaaggtgcagccgccgcccccagaagatatggaggaagattgggacagtcaggcagaggaggcggaggaggacagtctggaggacagtctggaggaagacagtttggaggaggaaaacgaggaggcagaggaggtggaagaagtaaccgccgacaaacagttatcctcggctgcggagacaagcaacagcgctaccatctccgctccgagtcgaggaacccggcggcgtcccagcagtagatgggacgagaccggacgcttcccgaacccaaccagcgcttccaagaccggtaagaaggatcggcagggatacaagtcctggcgggggcataagaatgccatcatctcctgcttgcatgagtgcgggggcaacatatccttcacgcggcgctacttgctattccaccatggggtgaactttccgcgcaatgttttgcattactaccgtcacctccacagcccctactatagccagcaaatcccggcagtctcgacagataaagacagcggcggcgacctccaacagaaaaccagcagcggcagttagaaaatacacaacaagtgcagcaacaggaggattaaagattacagccaacgagccagcgcaaacccgagagttaagaaatcggatctttccaaccctgtatgccatcttccagcagagtcggggtcaagagcaggaactgaaaataaaaaaccgatctctgcgttcgctcaccagaagttgtttgtatcacaagagcgaagatcaacttcagcgcactctcgaggacgccgaggctctcttcaacaagtactgcgcgctgactcttaaagagtaggcagcgaccgcgcttattcaaaaaaggcgggaattacatcatcctcgacatgagtaaagaaattcccacgccttacatgtggagttatcaaccccaaatgggattggcggcaggcgcctcccaggactactccacccgcatgaattggctcagcgccgggccttctatgatttctcgagttaatgatatacgcgcctaccgaaaccaaatacttttggaacagtcagctcttaccaccacgccccgccaacaccttaatcccagaaattggcccgccgccctagtgtaccaggaaagtcccgctcccaccactgtattacttcctcgagacgcccaggccgaagtccaaatgactaatgcaggtgcgcagttagctggcggctccaccctatgtcgtcacaggcctcggcataatataaaacgcctgatgatcagaggccgaggtatccagctcaacgacgagtcggtgagctctccgcttggtctacgaccagacggaatctttcagattgccggctgcgggagatcttccttcacccctcgtcaggctgttctgactttggaaagttcgtcttcgcaaccccgctcgggcggaatcgggaccgttcaatttgtggaggagtttactccctctgtctacttcaaccccttctccggatctcctgggcattacccggacgagttcataccgaacttcgacgcgattagcgagtcagtggacggctacgattgatgtctggtgacgcggctgagctatctcggctgcgacatctagaccactgccgccgctttcgctgctttgcccgggaactcattgagttcatctacttcgaactccccaaggatcaccctcaaggtccggcccacggagtgcggatttctatcgaaggcaaaatagactctcgcctgcaacgaattttctcccagcggcccgtgctgatcgagcgagaccagggaaacaccacggtttccatctactgcatttgtaatcaccccggattgcatgaaagcctttgctgtcttatgtgtactgagtttaataaaaactgaattaagactctcctacggactgccgcttcttcaacccggattttacaaccagaagaacgaaacttttcctgtcgtccaggactctgttaacttcacctttcctactcacaaactagaagctcaacgactacaccgcttttccagaagcattttccctactaatactactttcaaaaccggaggtgagctccaaggtcttcctacagaaaacccttgggtggaagcgggccttgtagtgctaggaattcttgcgggtgggcttgtgattattctttgctacctatacacaccttgcttcactttcttagtggtgttgtggtattggtttaaaaaatggggcccatactagtcttgcttgttttactttcgcttttggaaccgggttctgccaattacgatccatgtctagacttcgacccagaaaactgcacacttacttttgcacccgacacaagccgcatctgtggagttcatcgcctctcttacgaacttggcccccaacgacaaaaatttacctgcatggtgggaatcaaccccatagttatcacccagcaaagtggagatactaagggttgcattcactgctcctgcgattccatcgagtgcacctacaccctgctgaagaccctatgcggcctaagagacctgctaccaatgaattaaaaaatgattaataaaaaatcacttacttgaaatcagcaataaggtctctgttgaaattttctcccagcagcacctcacttccctcttcccaactctggtattctaaaccccgttcagcggcatactttctccatactttaaaggggatgtcaaattttagctcctctcctgtacccacaatcttcatgtctttcttcccagatgaccaagagagtccggctcagtgactccttcaaccctgtctacccctatgaagatgaaagcacctcccaacacccctttataaacccagggtttatttccccaaatggcttcacacaaagcccaaacggagttcttactttaaaatgtttaaccccactaacaaccacaggcggatctctacagctaaaagtgggagggggacttacagtggatgacaccaacggttttttgaaagaaaacataagtgccaccacaccactcgttaagactggtcactctataggtttaccactaggagccggattgggaacgaatgaaaataaactttgtatcaaattaggacaaggacttacattcaattcaaacaacatttgcattgatgacaatattaacaccttatggacaggagtcaaccccaccgaagccaactgtcaaatcatgaactccagtgaatctaatgattgcaaattaattctaacactagttaaaactggagcactagtcactgcatttgtttatgttataggagtatctaacaattttaatatgctaactacacacagaaatataaattttactgcagagctgtttttcgattctactggtaatttactaactagactctcatccctcaaaactccacttaatcataaatcaggacaaaacatggctactggtgccattactaatgctaaaggtttcatgcccagcacgactgcctatcctttcaatgataattctagagaaaaagaaaactacatttacggaacttgttactacacagctagtgatcgcactgcttttcccattgacatatctgtcatgcttaaccgaagagcaataaatgacgagacatcatattgtattcgtataacttggtcctggaacacaggagatgccccagaggtgcaaacctctgctacaaccctagtcacctccccatttaccttttactacatcagagaagacgactgacaaataaagtttgcgatcgccaggcccaccatgtgtcaccagcagttggtcatctcttggttttccctggtttttctggcatctcccctcgtggccatatgggaactgaagaaagatgtttatgtcgtagaattggattggtatccggatgcccctggagaaatggtggtcctcacctgtgacacccctgaagaagatggtatcacctggaccttggaccagagcagtgaggtcttaggctctggcaaaaccctgaccatccaagtcaaagagtttggagatgctggccagtacacctgtcacaaaggaggcgaggttctaagccattcgctcctgctgcttcacaaaaaggaagatggaatttggtccactgatattttaaaggaccagaaagaacccaaaaataagacctttctaagatgcgaggccaagaattattctggacgtttcacctgctggtggctgacgacaatcagtactgatttgacattcagtgtcaaaagcagcagaggctcttctgacccccaaggggtgacgtgcggagctgctacactctctgcagagagagtcagaggggacaacaaggagtatgagtactcagtggagtgccaggaggacagtgcctgcccagctgctgaggagagtctgcccattgaggtcatggtggatgccgttcacaagctcaagtatgaaaactacaccagcagcttcttcatcagggacatcatcaaacctgacccacccaagaacttgcagctgaagccattaaagaattctcggcaggtggaggtcagctgggagtaccctgacacctggagtactccacattcctacttctccctgacattctgcgttcaggtccagggcaagagcaagagagaaaagaaagatagagtcttcacggacaagacctcagccacggtcatctgccgcaaaaatgccagcattagcgtgcgggcccaggaccgctactatagctcatcttggagcgaatgggcatctgtgccctgcagtggagggggcggcagcgggggaggcggcagcggcggcgggggatcgagaaacctccccgtggccactccagacccaggaatgttcccatgccttcaccactcccaaaacctgctgagggccgtcagcaacatgctccagaaggccagacaaactctagaattttacccttgcacttctgaagagattgatcatgaagatatcacaaaagataaaaccagcacagtggaggcctgtttaccattggaattaaccaagaatgagagttgcctaaattccagagagacctctttcataactaatgggagttgcctggcctccagaaagacctcttttatgatggccctgtgccttagtagtatttatgaagacttgaagatgtaccaggtggagttcaagaccatgaatgcaaagcttctgatggatcctaagaggcagatctttctagatcaaaacatgctggcagttattgatgagctgatgcaggccctgaatttcaacagtgagactgtgccacaaaaatcctcccttgaagaaccggatttttataaaactaaaatcaagctctgcatacttcttcatgctttcagaattcgggcagtgactattgatagagtgatgagctatctgaatgcttccggaagcggagagggcagaggaagtctgctaacatgcggtgacgtcgaggagaatcctggacctgactggacctggcgcatcctgttcttggtggcagctgctacgggagctcattccaactgggtgaatgtaataagtgatttgaaaaaaattgaagatcttattcaatctatgcatattgatgctactttatatacggaaagtgatgttcaccccagttgcaaagtaacagcaatgaagtgctttctcttggagttacaagttatttcacttgagtccggagatgcaagtattcatgatacagtagaaaatctgatcatcctagcaaacaacagtttgtcttctaatgggaatgtaacagaatctggatgcaaagaatgtgaggaactggaggaaaaaaatattaaagaatttttgcagagttttgtacatattgtccaaatgttcatcaacacttctagcggtggcggatccggaggcggtgggagcgggggaggcggttctgggggaggcggtagcggcggaggttccctgcagatcacgtgccctccccccatgtccgtggaacacgcagacatctgggtcaagagctacagcttgtactccagggagcggtacatttgtaactctggtttcaagcgtaaagccggcacgtccagcctgacggagtgcgtgttgaacaaggccacgaatgtcgcccactggacaacccccagtctcaaatgcattagagactaagctagcttgactgactgagatacagcgtaccttcagctcacagacatgataagatacattgatgagtttggacaaaccacaactagaatgcagtgaaaaaaatgctttatttgtgaaatttgtgatgctattgctttatttgtaaccattataagctgcaataaacaagttaacaacaacaattgcattcattttatgtttcaggttcagggggaggtgtgggaggttttttaaagcaagtaaaacctctacaaatgtggtagtcgtcagctatcctgcaggaacttgtttatttgaaaatcaattcacaaaatccgagtagttattttgcctcccccttcccatttaacagaatacaccaatctctccccacgcacagctttaaacatttggataccattagatatagacatggttttagattccacattccaaacagtttcagagcgagccaatctggggtcagtgatagataaaaatccatcgggatagtcttttaaagcgctttcacagtccaactgctgcggatgcgactccggagtctggatcacggtcatctggaagaagaacgatgggaatcataatccgaaaacggtatcggacgattgtgtctcatcaaacccacaagcagccgctgtctgcgtcgctccgtgcgactgctgtttatgggatcagggtccacagtgtcctgaagcatgattttaatagcccttaacatcaactttctggtgcgatgcgcgcagcaacgcattctgatttcactcaaatctttgcagtaggtacaacacattattacaatattgtttaataaaccataattaaaagcgctccagccaaaactcatatctgatataatcgcccctgcatgaccatcataccaaagtttaatataaattaaatgacgttccctcaaaaacacactacccacatacatgatctcttttggcatgtgcatattaacaatctgtctgtaccatggacaacgttggttaatcatgcaacccaatataaccttccggaaccacactgccaacaccgctcccccagccatgcattgaagtgaaccctgctgattacaatgacaatgaagaacccaattctctcgaccgtgaatcacttgagaatgaaaaatatctatagtggcacaacatagacataaatgcatgcatcttctcataatttttaactcctcaggatttagaaacatatcccagggaataggaagctcttgcagaacagtaaagctggcagaacaaggaagaccacgaacacaacttacactatgcatagtcatagtatcacaatctggcaacagcgggtggtcttcagtcatagaagctcgggtttcattttcctcacaacgtggtaactgggctctggtgtaagggtgatgtctggcgcatgatgtcgagcgtgcgcgcaaccttgtcataatggagttgcttcctgacattctcgtattttgtatagcaaaacgcggccctggcagaacacactcttcttcgccttctatcctgccgcttagcgtgttccgtgtgatagttcaagtacaaccacactcttaagttggtcaaaagaatgctggcttcagttgtaatcaaaactccatcgcatctaatcgttctgaggaaatcatccaagcaatgcaactggattgtgtttcaagcaggagaggagagggaagagacggaagaaccatgttaatttttattccaaacgatctcgcagtacttcaaattgtagatcgcgcagatggcatctctcgcccccactgtgttggtgaaaaagcacagctagatcaaaagaaatgcgattttcaaggtgctcaacggtggcttccagcaaagcctccacgcgcacatccaagaacaaaagaataccaaaagaaggagcattttctaactcctcaatcatcatattacattcctgcaccattcccagataattttcagctttccagccttgaattattcgtgtcagttcttgtggtaaatccaatccacacattacaaacaggtcccggagggcgccctccaccaccattcttaaacacaccctcataatgacaaaatatcttgctcctgtgtcacctgtagcgaattgagaatggcaacatcaattgacatgcccttggctctaagttcttctttaagttctagttgtaaaaactctctcatattatcaccaaactgcttagccagaagccccccgggaacaagagcaggggacgctacagtgcagtacaagcgcagacctccccaattggctccagcaaaaacaagattggaataagcatattgggaaccgccagtaatatcatcgaagttgctggaaatataatcaggcagagtttcttgtaaaaattgaataaaagaaaaatttgccaaaaaaacattcaaaacctctgggatgcaaatgcaataggttaccgcgctgcgctccaacattgttagttttgaattagtctgcaaaaataaaaaaaaaaacaagcgtcatatcatagtagcctgacgaacagatggataaatcagtctttccatcacaagacaagccacagggtctccagctcgaccctcgtaaaacctgtcatcatgattaaacaacagcaccgaaagttcctcgcggtgaccagcatgaataattcttgatgaagcatacaatccagacatgttagcatcagttaacgagaaaaaacagccaacatagcctttgggtataattatgcttaatcgtaagtatagcaaagccacccctcgcggatacaaagtaaaaggcacaggagaataaaaaatataattatttctctgctgctgttcaggcaacgtcgcccccggtccctctaaatacacatacaaagcctcatcagccatggcttaccagacaaagtacagcgggcacacaaagcacaagctctaaagtgactctccaacctctccacaatatatatatacacaagccctaaactgacgtaatgggagtaaagtgtaaaaaatcccgccaaacccaacacacaccccgaaactgcgtcaccagggaaaagtacagtttcacttccgcaatcccaacaggcgtaacttcctctttctcacggtacgtgatatcccactaacttgcaacgtcattttcccacggtcgcaccgccccttttagccgttaaccccacagccaatcaccacacgatccacactttttaaaatcacctcatttacatattggcaccattccatctataaggtatattatatagataga

SEQ ID NO: 223 - DNA, 34984 bp, Artificial Sequence
  Genome sequence of NG-787A virus
tctatctatataatataccttatagatggaatggtgccaatatgtaaatgaggtgattttaaaaagtgtggatcgtgtggtgattggctgtggggttaacggctaaaaggggcggtgcgaccgtgggaaaatgacgttttgtgggggtggagtttttttgcaagttgtcgcgggaaatgtgacgcataaaaaggcttttttctcacggaactacttagttttcccacggtatttaacaggaaatgaggtagttttgaccggatgcaagtgaaaattgttgattttcgcgcgaaaactgaatgaggaagtgtttttctgaataatgtggtatttatggcagggtggagtatttgttcagggccaggtagactttgacccattacgtggaggtttcgattaccgtgttttttacctgaatttccgcgtaccgtgtcaaagtcttctgtttttacgtaggtgtcagctgatcgctagggtatttatacctcagggtttgtgtcaagaggccactcttgagtgccagcgagaagagttttctcctctgcgccggcagtttaataataaaaaaatgagagatttgcgatttctgcctcaggaaataatctctgctgagactggaaatgaaatattggagcttgtggtgcacgccctgatgggagacgatccggagccacctgtgcagctttttgagcctcctacgcttcaggaactgtatgatttagaggtagagggatcggaggattctaatgaggaagctgtaaatggcttttttaccgattctatgcttttagctgctaatgaagggttagaattagatccgcctttggacacttttgatactccaggggtaattgtggaaagcggtacaggtgtaagaaaattacctgatttgagttccgtggactgtgatttgcactgctatgaagacgggtttcctccgagtgatgaggaggaccatgaaaaggagcagtccatgcagactgcagcgggtgagggagtgaaggctgccaatgttggttttcagttggattgcccggagcttcctggacatggctgtaagtcttgtgaatttcacaggaaaaatactggagtaaaggaactgttatgttcgctttgttatatgagaacgcactgccactttatttacagtaagtgtgtttaagttaaaatttaaaggaatatgctgtttttcacatgtatattgagtgtgagttttgtgcttcttattataggtcctgtgtctgatgctgatgaatcaccatctcctgattctactacctcacctcctgagattcaagcacctgttcctgtggacgtgcgcaagcccattcctgtgaagcttaagcctgggaaacgtccagcagtggaaaaacttgaggacttgttacagggtggggacggacctttggacttgagtacacggaaacgtccaagacaataagtgttccatatccgtgtttacttaaggtgacgtcaatatttgtgtgacagtgcaatgtaataaaaatatgttaactgttcactggtttttattgctttttgggcggggactcaggtatataagtagaagcagacctgtgtggttagctcataggagctggctttcatccatggaggtttgggccattttggaagaccttaggaagactaggcaactgttagagaacgcttcggacggagtctccggtttttggagattctggttcgctagtgaattagctagggtagtttttaggataaaacaggactataaacaagaatttgaaaagttgttggtagattgcccaggactttttgaagctcttaatttgggccatcaggttcactttaaagaaaaagttttatcagttttagacttttcaaccccaggtagaactgctgctgctgtggcttttcttacttttatattagataaatggatcccgcagactcatttcagcaggggatacgttttggatttcatagccacagcattgtggagaacatggaaggttcgcaagatgaggacaatcttaggttactggccagtgcagcctttgggtgtagcgggaatcctgaggcatccaccggtcatgccagcggttctggaggaggaacagcaagaggacaacccgagagccggcctggaccctccagtggaggaggcggagtagctgacttgtctcctgaactgcaacgggtgcttactggatctacgtccactggacgggataggggcgttaagagggagagggcatctagtggtactgatgctagatctgagttggctttaagtttaatgagtcgcagacgtcctgaaaccatttggtggcatgaggttcagaaagagggaagggatgaagtttctgtattgcaggagaaatattcactggaacaggtgaaaacatgttggttggagcctgaggatgattgggaggtggccattaaaaattatgccaagatagctttgaggcctgataaacagtataagattactagacggattaatatccggaatgcttgttacatatctggaaatggggctgaggtggtaatagatactcaagacaaggcagttattagatgctgcatgatggatatgtggcctggggtagtcggtatggaagcagtaacttttgtaaatgttaagtttaggggagatggttataatggaatagtgtttatggccaataccaaacttatattgcatggttgtagcttttttggtttcaacaatacctgtgtagatgcctggggacaggttagtgtacggggatgtagtttctatgcgtgttggattgccacagctggcagaaccaagagtcaattgtctctgaagaaatgcatatttcaaagatgtaacctgggcattctgaatgaaggcgaagcaagggtccgccactgcgcttctacagatactggatgttttattttgattaagggaaatgccagcgtaaagcataacatgatttgcggtgcttccgatgagaggccttatcaaatgctcacttgtgctggtgggcattgtaatatgctggctactgtgcatattgtttcccatcaacgcaaaaaatggcctgtttttgatcacaatgtgatgacgaagtgtaccatgcatgcaggtgggcgtagaggaatgtttatgccttaccagtgtaacatgaatcatgtgaaagtgttgttggaaccagatgccttttccagaatgagcctaacaggaatttttgacatgaacatgcaaatctggaagatcctgaggtatgatgatacgagatcgagggtacgcgcatgcgaatgcggaggcaagcatgccaggttccagccggtgtgtgtagatgtgactgaagatctcagaccggatcatttggttattgcccgcactggagcagagttcggatccagtggagaagaaactgactaaggtgagtattgggaaaactttggggtgggattttcagatggacagattgagtaaaaatttgttttttctgtcttgcagctgtcatgagtggaaacgcttcttttaaggggggagtcttcagcccttatctgacagggcgtctcccatcctgggcaggagttcgtcagaatgttatgggatctactgtggatggaagacccgtccaacccgccaattcttcaacgctgacctatgctactttaagttcttcacctttggacgcagctgcagctgccgccgccgcttctgttgccgctaacactgtgcttggaatgggttactatggaagcatcatggctaattccacttcctctaataacccttctaccctgactcaggacaagttacttgtccttttggcccagctggaggctttgacccaacgtctgggtgaactttctcagcaggtggtcgagttgcgagtacaaactgagtctgctgtcggcacggcaaagtctaaataaaaaaatcccagaatcaatgaataaataaacaagcttgttgttgatttaaaatcaagtgtttttatttcatttttcgcgcacggtatgccctagaccaccgatctctatcattgagaactcggtggattttttccaggatcctatagaggtgggattgaatgtttagatacatgggcattaggccgtctttggggtggagatagctccattgaagggattcatgctccggggtagtgttgtaaatcacccagtcataacaaggtcgcagtgcatggtgttgcacaatatcttttagaagtaggctgattgccacagataagcccttggtgtaggtgtttacaaaccggttgagctgggatgggtgcattcggggtgaaattatgtgcattttggattggatttttaagttggcaatattgccgccaagatcccgtcttgggttcatgttatgaaggaccaccaagacggtgtatccggtacatttaggaaatttatcgtgcagcttggatggaaaagcgtggaaaaatttggagacacccttgtgtcctccaagattttccatgcactcatccatgataatagcaatggggccgtgggcagcggcgcgggcaaacacgttccgtgggtctgacacatcatagttatgttcctgagttaaatcatcataagccattttaatgaatttggggcggagagtaccagattggggtatgaatgttccttcgggccccggagcatagttcccctcacagatttgcatttcccaagctttcagttccgagggtggaatcatgtccacctggggggctatgaaaaacaccgtttctggggcgggggtgattaattgtgatgatagcaaatttctgagcaattgagatttgccacatccggtggggccataaatgattccgattacgggttgcaggtggtagtttagggaacggcaactgccgtcttctcgaagcaagggggccacctcgttcatcatttcccttacatgcatattttcccgcaccaaatccattaggaggcgctctcctcctagtgatagaagttcttgtagtgaggaaaagtttttcagcggtttcagaccgtcagccatgggcattttggagagagtttgctgcaaaagttctagtctgttccacagttcagtgatgtgttctatggcatctcgatccagcagacctcctcgtttcgcgggtttggacggctcctggaatagggtatgagacgatgggcgtccagcgctgccagggttcggtccttccagggtctcagtgttcgagtcagggttgtttccgtcacagtgaaggggtgtgcgcctgcttgggcgcttgccagggtgcgcttcagactcatcctgctggtcgaaaacttctgtcgcttggcgccctgtatgtcggccaagtagcagtttaccatgagttcgtagttgagcgcctcggctgcgtggcctttggcgcggagcttacctttggaagttttcttgcataccgggcagtataggcatttcagcgcatacaacttgggcgcaaggaaaacggattctggggagtatgcatctgcgccgcaggaggcgcaaacagtttcacattccaccagccaggttaaatccggttcattggggtcaaaaacaagttttccgccatattttttgatgcgtttcttacctttggtctccatgagttcgtgtcctcgttgagtgacaaacaggctgtccgtgtccccgtagactgattttacaggcctcttctccagtggagtgcctcggtcttcttcgtacaggaactctgaccactctgatacaaaggcgcgcgtccaggccagcacaaaggaggctatgtgggaggggtagcgatcgttgtcaaccagggggtccaccttttccaaagtatgcaaacacatgtcaccctcttcaacatccaggaatgtgattggcttgtaggtgtatttcacgtgacctggggtccccgctgggggggtataaaagggggcggttctttgctcttcctcactgtcttccggatcgctgtccaggaacgtcagctgttggggtaggtattccctctcgaaggcgggcatgacctctgcactcaggttgtcagtttctaagaacgaggaggatttgatattgacagtgccggttgagatgcctttcatgaggttttcgtccatctggtcagaaaacacaatttttttattgtcaagtttggtggcaaatgatccatacagggcgttggataaaagtttggcaatggatcgcatggtttggttcttttccttgtccgcgcgctctttggcggcgatgttgagttggacatactcgcgtgccaggcacttccattcggggaagatagttgttaattcatctggcacgattctcacttgccaccctcgattatgcaaggtaattaaatccacactggtggccacctcgcctcgaaggggttcattggtccaacagagcctacctcctttcctagaacagaaagggggaagtgggtctagcataagttcatcgggagggtctgcatccatggtaaagattcccggaagtaaatccttatcaaaatagctgatgggagtggggtcatctaaggccatttgccattctcgagctgccagtgcgcgctcatatgggttaaggggactgccccatggcatgggatgggtgagtgcagaggcatacatgccacagatgtcatagacgtagatgggatcctcaaagatgcctatgtaggttggatagcatcgcccccctctgatacttgctcgcacatagtcatatagttcatgtgatggcgctagcagccccggacccaagttggtgcgattgggtttttctgttctgtagacgatctggcgaaagatggcgtgagaattggaagagatggtgggtctttgaaaaatgttgaaatgggcatgaggtagacctacagagtctctgacaaagtgggcataagattcttgaagcttggttaccagttcggcggtgacaagtacgtctagggcgcagtagtcaagtgtttcttgaatgatgtcataacctggttggtttttcttttcccacagttcgcggttgagaaggtattcttcgcgatccttccagtactcttctagcggaaacccgtctttgtctgcacggtaagatcctagcatgtagaactgattaactgccttgtaagggcagcagcccttctctacgggtagagagtatgcttgagcagcttttcgtagcgaagcgtgagtaagggcaaaggtgtctctgaccatgactttgaggaattggtatttgaagtcgatgtcgtcacaggctccctgttcccagagttggaagtctacccgtttcttgtaggcggggttgggcaaagcgaaagtaacatcattgaagagaatcttgccggccctgggcatgaaattgcgagtgatgcgaaaaggctgtggtacttccgctcggttattgataacctgggcagctaggacgatctcgtcgaaaccgttgatgttgtgtcctacgatgtataattctatgaaacgcggcgtgcctctgacgtgaggtagcttactgagctcatcaaaggttaggtctgtggggtcagataaggcgtagtgttcgagagcccattcgtgcaggtgaggattcgctttaaggaaggaggaccagaggtccactgccagtgctgtttgtaactggtcccggtactgacgaaaatgccgtccgactgccattttttctggggtgacgcaatagaaggtttgggggtcctgccgccagcgatcccacttgagttttatggcgaggtcataggcgatgttgacgagccgctggtctccagagagtttcatgaccagcatgaaggggattagctgcttgccaaaggaccccatccaggtgtaggtttccacatcgtaggtgagaaagagcctttctgtgcgaggatgagagccaatcgggaagaactggatctcctgccaccagttggaggaatggctgttgatgtgatggaagtagaactccctgcgacgcgccgagcattcatgcttgtgcttgtacagacggccgcagtagtcgcagcgttgcacgggttgtatctcgtgaatgagttgtacctggcttcccttgacgagaaatttcagtgggaagccgaggcctggcgattgtatctcgtgctttactatgttgtctgcatcggcctgttcatcttctgtctcgatggtggtcatgctgacgagccctcgcgggaggcaagtccagacctcggcgcggcaggggcggagctcgaggacgagagcgcgcaggctggagctgtccagggtcctgagacgctgcggactcaggttagtaggcagtgtcaggagattaacttgcatgatcttttggagggcgtgcgggaggttcagatagtacttgatctcaacgggtccgttggtggagatgtcgatggcttgcagggttccgtgtcccttgggcgctaccaccgtgcccttgtttttcattttggacggcggtggctctgttgcttcttgcatgtttagaagcggtgtcgagggcgcgcaccgggcggcaggggcggctcgggacccggcggcatggctggcagtggtacgtcggcgccgcgcgcgggtaggttctggtactgcgccctgagaagactcgcatgcgcgacgacgcggcggttgacatcctggatctgacgcctctgggtgaaagctaccggccccgtgagcttgaacctgaaagagagttcaacagaatcaatctcggtatcgttgacggcggcttgcctaaggatttcttgcacgtcaccagagttgtcctggtaggcgatctccgccatgaactgctcgatctcttcctcttgaagatctccgcggcccgctctctcgacggtggccgcgaggtcgttggagatgcgcccaatgagttgagagaatgcattcatgcccgcctcgttccagacgcggctgtagaccacggcccccacgggatctctcgcgcgcatgaccacctgggcgaggttgagctccacgtggcgggtgaagaccgcatagttgcataggcgctggaaaaggtagttgagtgtggtggcgatgtgctcggtgacgaagaaatacatgatccatcgtctcagcggcatctcgctgacatcgcccagagcttccaagcgctccatggcctcgtagaagtccacggcaaaattaaaaaactgggagtttcgcgcggacacggtcaactcctcttccagaagacggataagttcggcgatggtggtgcgcacctcgcgctcgaaagcccctgggatttcttcctcaatctcttcttcttccactaacatctcttcctcttcaggtggggctgcaggaggagggggaacgcggcgacgccggcggcgcacgggcagacggtcgatgaatctttcaatgacctctccgcggcggcggcgcatggtttcagtgacggcgcggccgttctcgcgcggtcgcagagtaaaaacaccgccgcgcatctccttaaagtggtgactgggaggttctccgtttgggagggagagggcgctgattatacattttattaattggcccgtagggactgcacgcagagatctgatcgtgtcaagatccacgggatctgaaaacctttcgacgaaagcgtctaaccagtcacagtcacaaggtaggctgagtacggcttcttgtgggcgggggtggttatgtgttcggtctgggtcttctgtttcttcttcatctcgggaaggtgagacgatgctgctggtgatgaaattaaagtaggcagttctaagacggcggatggtggcgaggagcaccaggtctttgggtccggcttgctggatacgcaggcgattggccattccccaagcattatcctgacatctagcaagatctttgtagtagtcttgcatgagccgttctacgggcacttcttcctcacccgttctgccatgcatacgtgtgagtccaaatccgcgcattggttgtaccagtgccaagtcagctacgactctttcggcgaggatggcttgctgtacttgggtaagggtggcttgaaagtcatcaaaatccacaaagcggtggtaagctcctgtattaatggtgtaagcacagttggccatgactgaccagttaactgtctggtgaccagggcgcacgagctcggtgtatttaaggcgcgaataggcgcgggtgtcaaagatgtaatcgttgcaggtgcgcaccagatactggtaccctataagaaaatgcggcggtggttggcggtagagaggccatcgttctgtagctggagcgccaggggcgaggtcttccaacataaggcggtgatagccgtagatgtacctggacatccaggtgattcctgcggcggtagtagaagcccgaggaaactcgcgtacgcggttccaaatgttgcgtagcggcatgaagtagttcattgtaggcacggtttgaccagtgaggcgcgcgcagtcattgatgctctatagacacggagaaaatgaaagcgttcagcgactcgactccgtagcctggaggaacgtgaacgggttgggtcgcggtgtaccccggttcgagacttgtactcgagccggccggagccgcggctaacgtggtattggcactcccgtctcgacccagcctacaaaaatccaggatacggaatcgagtcgttttgctggtttccgaatggcagggaagtgagtcctattttttttttttgccgctcagatgcatcccgtgctgcgacagatgcgcccccaacaacagcccccctcgcagcagcagcagcagcaatcacaaaaggctgtccctgcaactactgcaactgccgccgtgagcggtgcgggacagcccgcctatgatctggacttggaagagggcgaaggactggcacgtctaggtgcgccttcacccgagcggcatccgcgagttcaactgaaaaaagattctcgcgaggcgtatgtgccccaacagaacctatttagagacagaagcggcgaggagccggaggagatgcgagcttcccgctttaacgcgggtcgtgagctgcgtcacggtttggaccgaagacgagtgttgcgggacgaggatttcgaagttgatgaaatgacagggatcagtcctgccagggcacacgtggctgcagccaaccttgtatcggcttacgagcagacagtaaaggaagagcgtaacttccaaaagtcttttaataatcatgtgcgaaccctgattgcccgcgaagaagttacccttggtttgatgcatttgtgggatttgatggaagctatcattcagaaccctactagcaaacctctgaccgcccagctgtttctggtggtgcaacacagcagagacaatgaggctttcagagaggcgctgctgaacatcaccgaacccgaggggagatggttgtatgatcttatcaacattctacagagtatcatagtgcaggagcggagcctgggcctggccgagaaggtggctgccatcaattactcggttttgagcttgggaaaatattacgctcgcaaaatctacaagactccatacgttcccatagacaaggaggtgaagatagatgggttctacatgcgcatgacgctcaaggtcttgaccctgagcgatgatcttggggtgtatcgcaatgacagaatgcatcgcgcggttagcgccagcaggaggcgcgagttaagcgacagggaactgatgcacagtttgcaaagagctctgactggagctggaaccgagggtgagaattacttcgacatgggagctgacttgcagtggcagcctagtcgcagggctctgagcgccgcgacggcaggatgtgagcttccttacatagaagaggcggatgaaggcgaggaggaagagggcgagtacttggaagactgatggcacaacccgtgttttttgctagatggaacagcaagcaccggatcccgcaatgcgggcggcgctgcagagccagccgtccggcattaactcctcggacgattggacccaggccatgcaacgtatcatggcgttgacgactcgcaaccccgaagcctttagacagcaaccccaggccaaccgtctatcggccatcatggaagctgtagtgccttcccgctctaatcccactcatgagaaggtcctggccatcgtgaacgcgttggtggagaacaaagctattcgtccagatgaggccggactggtatacaacgctctcttagaacgcgtggctcgctacaacagtagcaatgtgcaaaccaatttggaccgtatgataacagatgtacgcgaagccgtgtctcagcgcgaaaggttccagcgtgatgccaacctgggttcgctggtggcgttaaatgctttcttgagtactcagcctgctaatgtgccgcgtggtcaacaggattatactaactttttaagtgctttgagactgatggtatcagaagtacctcagagcgaagtgtatcagtccggtcctgattacttctttcagactagcagacagggcttgcagacggtaaatctgagccaagcttttaaaaaccttaaaggtttgtggggagtgcatgccccggtaggagaaagagcaaccgtgtctagcttgttaactccgaactcccgcctattattactgttggtagctcctttcaccgacagcggtagcatcgaccgtaattcctatttgggttacctactaaacctgtatcgcgaagccatagggcaaagtcaggtggacgagcagacctatcaagaaattacccaagtcagtcgcgctttgggacaggaagacactggcagtttggaagccactctgaacttcttgcttaccaatcggtctcaaaagatccctcctcaatatgctcttactgcggaggaggagaggatccttagatatgtgcagcagagcgtgggattgtttctgatgcaagagggggcaactccgactgcagcactggacatgacagcgcgaaatatggagcccagcatgtatgccagtaaccgacctttcattaacaaactgctggactacttgcacagagctgccgctatgaactctgattatttcaccaatgccatcttaaacccgcactggctgcccccacctggtttctacacgggcgaatatgacatgcccgaccctaatgacggatttctgtgggacgacgtggacagcgatgttttttcacctctttctgatcatcgcacgtggaaaaaggaaggcggcgatagaatgcattcttctgcatcgctgtccggggtcatgggtgctaccgcggctgagcccgagtctgcaagtccttttcctagtctacccttttctctacacagtgtacgtagcagcgaagtgggtagaataagtcgcccgagtttaatgggcgaagaggagtatctaaacgattccttgctcagaccggcaagagaaaaaaatttcccaaacaatggaatagaaagtttggtggataaaatgagtagatggaagacttatgctcaggatcacagagacgagcctgggatcatggggattacaagtagagcgagccgtagacgccagcgccatgacagacagaggggtcttgtgtgggacgatgaggattcggccgatgatagcagcgtgctggacttgggtgggagaggaaggggcaacccgtttgctcatttgcgccctcgcttgggtggtatgttgtaaaaaaaaataaaaaaaaaactcaccaaggccatggcgacgagcgtacgttcgttcttctttattatctgtgtctagtataatgaggcgagtcgtgctaggcggagcggtggtgtatccggagggtcctcctccttcgtacgagagcgtgatgcagcagcagcaggcgacggcggtgatgcaatccccactggaggctccctttgtgcctccgcgatacctggcacctacggagggcagaaacagcattcgttattcggaactggcacctcagtacgataccaccaggttgtatctggtggacaacaagtcggcggacattgcttctctgaactatcagaatgaccacagcaacttcttgaccacggtggtgcaaaacaatgactttacccctacggaagccagcacccagaccattaactttgatgaacgatcgcggtggggcggtcagctaaagaccatcatgcatactaacatgccaaacgtgaacgagtatatgtttagtaacaagttcaaagcgcgtgtgatggtgtccagaaaacctcccgacggtgctgcagttggggatacttatgatcacaagcaggatattttgaaatatgagtggttcgagtttactttgccagaaggcaacttttcagttactatgactattgatttgatgaacaatgccatcatagataattacttgaaagtgggtagacagaatggagtgcttgaaagtgacattggtgttaagttcgacaccaggaacttcaagctgggatgggatcccgaaaccaagttgatcatgcctggagtgtatacgtatgaagccttccatcctgacattgtcttactgcctggctgcggagtggattttaccgagagtcgtttgagcaaccttcttggtatcagaaaaaaacagccatttcaagagggttttaagattttgtatgaagatttagaaggtggtaatattccggccctcttggatgtagatgcctatgagaacagtaagaaagaacaaaaagccaaaatagaagctgctacagctgctgcagaagctaaggcaaacatagttgccagcgactctacaagggttgctaacgctggagaggtcagaggagacaattttgcgccaacacctgttccgactgcagaatcattattggccgatgtgtctgaaggaacggacgtgaaactcactattcaacctgtagaaaaagatagtaagaatagaagctataatgtgttggaagacaaaatcaacacagcctatcgcagttggtatctttcgtacaattatggcgatcccgaaaaaggagtgcgttcctggacattgctcaccacctcagatgtcacctgcggagcagagcaggtctactggtcgcttccagacatgatgaaggatcctgtcactttccgctccactagacaagtcagtaactaccctgtggtgggtgcagagcttatgcccgtcttctcaaagagcttctacaacgaacaagctgtgtactcccagcagctccgccagtccacctcgcttacgcacgtcttcaaccgctttcctgagaaccagattttaatccgtccgccggcgcccaccattaccaccgtcagtgaaaacgttcctgctctcacagatcacgggaccctgccgttgcgcagcagtatccggggagtccaacgtgtgaccgttactgacgccagacgccgcacctgtccctacgtgtacaaggcactgggcatagtcgcaccgcgcgtcctttcaagccgcactttctaaaaaaaaaaaaaatgtccattcttatctcgcccagtaataacaccggttggggtctgcgcgctccaagcaagatgtacggaggcgcacgcaaacgttctacccaacatcctgtccgtgttcgcggacattttcgcgctccatggggcgccctcaagggccgcactcgcgttcgaaccaccgtcgatgatgtaatcgatcaggtggttgccgacgcccgtaattatactcctactgcgcctacatctactgtggatgcagttattgacagtgtagtggctgacgctcgcaactatgctcgacgtaagagccggcgaaggcgcattgccagacgccaccgagctaccactgccatgcgagccgcaagagctctgctacgaagagctagacgcgtggggcgaagagccatgcttagggcggccagacgtgcagcttcgggcgccagcgccggcaggtcccgcaggcaagcagccgctgtcgcagcggcgactattgccgacatggcccaatcgcgaagaggcaatgtatactgggtgcgtgacgctgccaccggtcaacgtgtacccgtgcgcacccgtccccctcgcacttagaagatactgagcagtctccgatgttgtgtcccagcggcgaggatgtccaagcgcaaatacaaggaagaaatgctgcaggttatcgcacctgaagtctacggccaaccgttgaaggatgaaaaaaaaccccgcaaaatcaagcgggttaaaaaggacaaaaaagaagaggaagatggcgatgatgggctggcggagtttgtgcgcgagtttgccccacggcgacgcgtgcaatggcgtgggcgcaaagttcgacatgtgttgagacctggaacttcggtggtctttacacccggcgagcgttcaagcgctacttttaagcgttcctatgatgaggtgtacggggatgatgatattcttgagcaggcggctgaccgattaggcgagtttgcttatggcaagcgtagtagaataacttccaaggatgagacagtgtcgatacccttggatcatggaaatcccacccctagtcttaaaccggtcactttgcagcaagtgttacccgtaactccgcgaacaggtgttaaacgcgaaggtgaagatttgtatcccactatgcaactgatggtacccaaacgccagaagttggaggacgttttggagaaagtaaaagtggatccagatattcaacctgaggttaaagtgagacccattaagcaggtagcgcctggtctgggggtacaaactgtagacattaagattcccactgaaagtatggaagtgcaaactgaacccgcaaagcctactgccacctccactgaagtgcaaacggatccatggatgcccatgcctattacaactgacgccgccggtcccactcgaagatcccgacgaaagtacggtccagcaagtctgttgatgcccaattatgttgtacacccatctattattcctactcctggttaccgaggcactcgctactatcgcagccgaaacagtacctcccgccgtcgccgcaagacacctgcaaatcgcagtcgtcgccgtagacgcacaagcaaaccgactcccggcgccctggtgcggcaagtgtaccgcaatggtagtgcggaacctttgacactgccgcgtgcgcgttaccatccgagtatcatcacttaatcaatgttgccgctgcctccttgcagatatggccctcacttgtcgccttcgcgttcccatcactggttaccgaggaagaaactcgcgccgtagaagagggatgttgggacgcggaatgcgacgctacaggcgacggcgtgctatccgcaagcaattgcggggtggttttttaccagccttaattccaattatcgctgctgcaattggcgcgataccaggcatagcttccgtggcggttcaggcctcgcaacgacattgacattggaaaaaaacgtataaataaaaaaaaaaaaatacaatggactctgacactcctggtcctgtgactatgttttcttagagatggaagacatcaatttttcatccttggctccgcgacacggcacgaagccgtacatgggcacctggagcgacatcggcacgagccaactgaacgggggcgccttcaattggagcagtatctggagcgggcttaaaaattttggctcaaccataaaaacatacgggaacaaagcttggaacagcagtacaggacaggcgcttagaaataaacttaaagaccagaacttccaacaaaaagtagtcgatgggatagcttccggcatcaatggagtggtagatttggctaaccaggctgtgcagaaaaagataaacagtcgtttggacccgccgccagcaaccccaggtgaaatgcaagtggaggaagaaattcctccgccagaaaaacgaggcgacaagcgtccgcgtcccgatttggaagagacgctggtgacgcgcgtagatgaaccgccttcttatgaggaagcaacgaagcttggaatgcccaccactagaccgatagccccaatggccaccggggtgatgaaaccttctcagttgcatcgacccgtcaccttggatttgccccctccccctgctgctactgctgtacccgcttctaagcctgtcgctgccccgaaaccagtcgccgtagccaggtcacgtcccgggggcgctcctcgtccaaatgcgcactggcaaaatactctgaacagcatcgtgggtctaggcgtgcaaagtgtaaaacgccgtcgctgcttttaattaaatatggagtagcgcttaacttgcctatctgtgtatatgtgtcattacacgccgtcacagcagcagaggaaaaaaggaagaggtcgtgcgtcgacgctgagttactttcaagatggccaccccatcgatgctgccccaatgggcatacatgcacatcgccggacaggatgcttcggagtacctgagtccgggtctggtgcagttcgcccgcgccacagacacctacttcaatctgggaaataagtttagaaatcccaccgtagcgccgacccacgatgtgaccaccgaccgtagccagcggctcatgttgcgcttcgtgcccgttgaccgggaggacaatacatactcttacaaagtgcggtacaccctggccgtgggcgacaacagagtgctggatatggccagcacgttctttgacattaggggtgtgttggacagaggtcccagtttcaaaccctattctggtacggcttacaactccctggctcctaaaggcgctccaaatacatctcagtggattgcagaaggtgtaaaaaatacaactggtgaggaacacgtaacagaagaggaaaccaatactactacttacacttttggcaatgctcctgtaaaagctgaagctgaaattacaaaagaaggactcccagtaggtttggaagtttcagatgaagaaagtaaaccgatttatgctgataaaacatatcagccagaacctcagctgggagatgaaacttggactgaccttgatggaaaaaccgaaaagtatggaggcagggctctcaaacccgatactaagatgaaaccatgctacgggtcctttgccaaacctactaatgtgaaaggcggtcaggcaaaacaaaaaacaacggagcagccaaatcagaaagtcgaatatgatatcgacatggagttttttgatgcggcatcgcagaaaacaaacttaagtcctaaaattgtcatgtatgcagaaaatgtaaatttggaaactccagacactcatgtagtgtacaaacctggaacagaagacacaagttccgaagctaatttgggacaacaatctatgcccaacagacccaactacattggcttcagagataactttattggacttatgtactataacagtactggtaacatgggggtgctggctggtcaagcgtctcagttaaatgcagtggttgacttgcaggacagaaacacagaactttcttaccaactcttgcttgactctctgggcgacagaaccagatactttagcatgtggaatcaggctgtggacagttatgatcctgatgtacgtgttattgaaaatcatggtgtggaagatgaacttcccaactactgttttccactggacggcataggtgttccaacaaccagttacaaatcaatagttccaaatggagacaatgcgcctaattggaaggaacctgaagtaaatggaacaagtgagatcggacagggtaatttgtttgccatggaaattaaccttcaagccaatctatggcgaagtttcctttattccaatgtggctctatatctcccagactcgtacaaatacaccccgtccaatgtcactcttccagaaaacaaaaacacctacgactacatgaacgggcgggtggtgccgccatctctagtagacacctatgtgaacattggtgccaggtggtctctggatgccatggacaatgtcaacccattcaaccaccaccgtaacgctggcttgcgttaccgatccatgcttctgggtaacggacgttatgtgcctttccacatacaagtgcctcaaaaattcttcgctgttaaaaacctgctgcttctcccaggctcctacacttatgagtggaactttaggaaggatgtgaacatggttctacagagttccctcggtaacgacctgcgggtagatggcgccagcatcagtttcacgagcatcaacctctatgctacttttttccccatggctcacaacaccgcttccacccttgaagccatgctgcggaatgacaccaatgatcagtcattcaacgactacctatctgcagctaacatgctctaccccattcctgccaatgcaaccaatattcccatttccattccttctcgcaactgggcggctttcagaggctggtcatttaccagactgaaaaccaaagaaactccctctttggggtctggatttgacccctactttgtctattctggttctattccctacctggatggtaccttctacctgaaccacacttttaagaaggtttccatcatgtttgactcttcagtgagctggcctggaaatgacaggttactatctcctaacgaatttgaaataaagcgcactgtggatggcgaaggctacaacgtagcccaatgcaacatgaccaaagactggttcttggtacagatgctcgccaactacaacatcggctatcagggcttctacattccagaaggatacaaagatcgcatgtattcatttttcagaaacttccagcccatgagcaggcaggtggttgatgaggtcaattacaaagacttcaaggccgtcgccataccctaccaacacaacaactctggctttgtgggttacatggctccgaccatgcgccaaggtcaaccctatcccgctaactatccctatccactcattggaacaactgccgtaaatagtgttacgcagaaaaagttcttgtgtgacagaaccatgtggcgcataccgttctcgagcaacttcatgtctatgggggcccttacagacttgggacagaatatgctctatgccaactcagctcatgctctggacatgacctttgaggtggatcccatggatgagcccaccctgctttatcttctcttcgaagttttcgacgtggtcagagtgcatcagccacaccgcggcatcatcgaggcagtctacctgcgtacaccgttctcggccggtaacgctaccacgtaagaagcttcttgcttcttgcaaatagcagctgcaaccatggcctgcggatcccaaaacggctccagcgagcaagagctcagagccattgtccaagacctgggttgcggaccctattttttgggaacctacgataagcgcttcccggggttcatggcccccgataagctcgcctgtgccattgtaaatacggccggacgtgagacggggggagagcactggttggctttcggttggaacccacgttctaacacctgctacctttttgatccttttggattctcggatgatcgtctcaaacagatttaccagtttgaatatgagggtctcctgcgccgcagcgctcttgctaccaaggaccgctgtattacgctggaaaaatctacccagaccgtgcagggtccccgttctgccgcctgcggacttttctgctgcatgttccttcacgcctttgtgcactggcctgaccgtcccatggacggaaaccccaccatgaaattgctaactggagtgccaaacaacatgcttcattctcctaaagtccagcccaccctgtgtgacaatcaaaaagcactctaccattttcttaatacccattcgccttattttcgctcccatcgtacacacatcgaaagggccactgcgttcgaccgtatggatgttcaataatgactcatgtaaacaacgtgttcaataaacatcactttatttttttacatgtatcaaggctctgcattacttatttatttacaagtcgaatgggttctgacgagaatcagaatgacccgcaggcagtgatacgttgcggaactgatacttgggttgccacttgaattcgggaatcaccaacttgggaaccggtatatcgggcaggatgtcactccacagctttctggtcagctgcaaagctccaagcaggtcaggagccgaaatcttgaaatcacaattaggaccagtgctttgagcgcgagagttgcggtacaccggattgcagcactgaaacaccatcagcgacggatgtctcacgcttgccagcacggtgggatctgcaatcatgcccacatccagatcttcagcattggcaatgctgaacggggtcatcttgcaggtctgcctacccatggcgggcacccaattaggcttgtggttgcaatcgcagtgcagggggatcagtatcatcttggcctgatcctgtctgattcctggatacacggctctcatgaaagcatcatattgcttgaaagcctgctgggctttactaccctcggtataaaacatcccgcaggacctgctcgaaaactggttagctgcacagccggcatcattcacacagcagcgggcgtcattgttagctatttgcaccacacttctgccccagcggttttgggtgattttggttcgctcgggattctcctttaaggctcgttgtccgttctcgctggccacatccatctcgataatctgctccttctgaatcataatattgccatgcaggcacttcagcttgccctcataatcattgcagccatgaggccacaacgcacagcctgtacattcccaattatggtgggcgatctgagaaaaagaatgtatcattccctgcagaaatcttcccatcatcgtgctcagtgtcttgtgactagtgaaagttaactggatgcctcggtgctcctcgtttacgtactggtgacagatgcgcttgtattgttcgtgttgctcaggcattagtttaaaagaggttctaagttcgttatccagcctgtacttctccatcagcagacacatcacttccatgcctttctcccaagcagacaccaggggcaagctaatcggattcttaacagtgcaggcagcagctcctttagccagagggtcatctttagcgatcttctcaatgcttcttttgccatccttctcaacgatgcgcacgggcgggtagctgaaacccactgctacaagttgcgcctcttctctttcttcttcgctgtcttgactgatgtcttgcatggggatatgtttggtcttccttggcttctttttggggggtatcggaggaggaggactgtcgctccgttccggagacagggaggattgtgacgtttcgctcaccattaccaactgactgtcggtagaagaacctgaccccacacggcgacaggtgtttctcttcgggggcagaggtggaggcgattgcgaagggctgcggtccgacctggaaggcggatgactggcagaaccccttccgcgttcgggggtgtgctccctgtggcggtcgcttaactgatttccttcgcggctggccattgtgttctcctaggcagagaaacaacagacatggaaactcagccattgctgtcaacatcgccacgagtgccatcacatctcgtcctcagcgacgaggaaaaggagcagagcttaagcattccaccgcccagtcctgccaccacctctaccctagaagataaggaggtcgacgcatctcatgacatgcagaataaaaaagcgaaagagtctgagacagacatcgagcaagacccgggctatgtgacaccggtggaacacgaggaagagttgaaacgctttctagagagagaggatgaaaactgcccaaaacaacgagcagataactatcaccaagatgctggaaatagggatcagaacaccgactacctcatagggcttgacggggaagacgcgctccttaaacatctagcaagacagtcgctcatagtcaaggatgcattattggacagaactgaagtgcccatcagtgtggaagagctcagccgcgcctacgagcttaacctcttttcacctcgtactccccccaaacgtcagccaaacggcacctgcgagccaaatcctcgcttaaacttttatccagcttttgctgtgccagaagtactggctacctatcacatcttttttaaaaatcaaaaaattccagtctcctgccgcgctaatcgcacccgcgccgatgccctactcaatctgggacctggttcacgcttacctgatatagcttccttggaagaggttccaaagatcttcgagggtctgggcaataatgagactcgggccgcaaatgctctgcaaaagggagaaaatggcatggatgagcatcacagcgttctggtggaattggaaggcgataatgccagactcgcagtactcaagcgaagcatcgaggtcacacacttcgcatatcccgctgtcaacctgccccctaaagtcatgacggcggtcatggaccagttactcattaagcgcgcaagtcccctttcagaagacatgcatgacccagatgcctgtgatgagggtaaaccagtggtcagtgatgagcagctaacccgatggctgggcaccgactctcccagggatttggaagagcgtcgcaagcttatgatggccgtggtgctggttaccgtagaactagagtgtctccgacgtttctttaccgattcagaaaccttgcgcaaactcgaagagaatctgcactacacttttagacacggctttgtgcggcaggcatgcaagatatctaacgtggaactcaccaacctggtttcctacatgggtattctgcatgagaatcgcctaggacaaagcgtgctgcacagcaccctgaagggggaagcccgccgtgattacatccgcgattgtgtctatctgtacctgtgccacacgtggcaaaccggcatgggtgtatggcagcaatgtttagaagaacagaacttgaaagagcttgacaagctcttacagaaatctcttaaggttctgtggacagggttcgacgagcgcaccgtcgcttccgacctggcagacctcatcttcccagagcgtctcagggttactttgcgaaacggattgcctgactttatgagccagagcatgcttaacaattttcgctctttcatcctggaacgctccggtatcctgcccgccacctgctgcgcactgccctccgactttgtgcctctcacctaccgcgagtgccccccgccgctatggagtcactgctacctgttccgtctggccaactatctctcctaccactcggatgtgatcgaggatgtgagcggagacggcttgctggagtgtcactgccgctgcaatctgtgcacgccccaccggtccctagcttgcaacccccagttgatgagcgaaacccagataataggcacctttgaattgcaaggccccagcagccaaggcgatgggtcttctcctgggcaaagtttaaaactgaccccgggactgtggacctccgcctacttgcgcaagtttgctccggaagattaccacccctatgaaatcaagttctatgaggaccaatcacagcctccaaaggccgaactttcggcctgcgtcatcacccagggggcaattctggcccaattgcaagccatccaaaaatcccgccaagaatttctactgaaaaagggtaagggggtctaccttgacccccagaccggcgaggaactcaacacaaggttccctcaggatgtcccaacgacgagaaaacaagaagttgaaggtgcagccgccgcccccagaagatatggaggaagattgggacagtcaggcagaggaggcggaggaggacagtctggaggacagtctggaggaagacagtttggaggaggaaaacgaggaggcagaggaggtggaagaagtaaccgccgacaaacagttatcctcggctgcggagacaagcaacagcgctaccatctccgctccgagtcgaggaacccggcggcgtcccagcagtagatgggacgagaccggacgcttcccgaacccaaccagcgcttccaagaccggtaagaaggatcggcagggatacaagtcctggcgggggcataagaatgccatcatctcctgcttgcatgagtgcgggggcaacatatccttcacgcggcgctacttgctattccaccatggggtgaactttccgcgcaatgttttgcattactaccgtcacctccacagcccctactatagccagcaaatcccggcagtctcgacagataaagacagcggcggcgacctccaacagaaaaccagcagcggcagttagaaaatacacaacaagtgcagcaacaggaggattaaagattacagccaacgagccagcgcaaacccgagagttaagaaatcggatctttccaaccctgtatgccatcttccagcagagtcggggtcaagagcaggaactgaaaataaaaaaccgatctctgcgttcgctcaccagaagttgtttgtatcacaagagcgaagatcaacttcagcgcactctcgaggacgccgaggctctcttcaacaagtactgcgcgctgactcttaaagagtaggcagcgaccgcgcttattcaaaaaaggcgggaattacatcatcctcgacatgagtaaagaaattcccacgccttacatgtggagttatcaaccccaaatgggattggcggcaggcgcctcccaggactactccacccgcatgaattggctcagcgccgggccttctatgatttctcgagttaatgatatacgcgcctaccgaaaccaaatacttttggaacagtcagctcttaccaccacgccccgccaacaccttaatcccagaaattggcccgccgccctagtgtaccaggaaagtcccgctcccaccactgtattacttcctcgagacgcccaggccgaagtccaaatgactaatgcaggtgcgcagttagctggcggctccaccctatgtcgtcacaggcctcggcataatataaaacgcctgatgatcagaggccgaggtatccagctcaacgacgagtcggtgagctctccgcttggtctacgaccagacggaatctttcagattgccggctgcgggagatcttccttcacccctcgtcaggctgttctgactttggaaagttcgtcttcgcaaccccgctcgggcggaatcgggaccgttcaatttgtggaggagtttactccctctgtctacttcaaccccttctccggatctcctgggcattacccggacgagttcataccgaacttcgacgcgattagcgagtcagtggacggctacgattgatgtctggtgacgcggctgagctatctcggctgcgacatctagaccactgccgccgctttcgctgctttgcccgggaactcattgagttcatctacttcgaactccccaaggatcaccctcaaggtccggcccacggagtgcggatttctatcgaaggcaaaatagactctcgcctgcaacgaattttctcccagcggcccgtgctgatcgagcgagaccagggaaacaccacggtttccatctactgcatttgtaatcaccccggattgcatgaaagcctttgctgtcttatgtgtactgagtttaataaaaactgaattaagactctcctacggactgccgcttcttcaacccggattttacaaccagaagaacgaaacttttcctgtcgtccaggactctgttaacttcacctttcctactcacaaactagaagctcaacgactacaccgcttttccagaagcattttccctactaatactactttcaaaaccggaggtgagctccaaggtcttcctacagaaaacccttgggtggaagcgggccttgtagtgctaggaattcttgcgggtgggcttgtgattattctttgctacctatacacaccttgcttcactttcttagtggtgttgtggtattggtttaaaaaatggggcccatactagtcttgcttgttttactttcgcttttggaaccgggttctgccaattacgatccatgtctagacttcgacccagaaaactgcacacttacttttgcacccgacacaagccgcatctgtggagttcatcgcctctcttacgaacttggcccccaacgacaaaaatttacctgcatggtgggaatcaaccccatagttatcacccagcaaagtggagatactaagggttgcattcactgctcctgcgattccatcgagtgcacctacaccctgctgaagaccctatgcggcctaagagacctgctaccaatgaattaaaaaatgattaataaaaaatcacttacttgaaatcagcaataaggtctctgttgaaattttctcccagcagcacctcacttccctcttcccaactctggtattctaaaccccgttcagcggcatactttctccatactttaaaggggatgtcaaattttagctcctctcctgtacccacaatcttcatgtctttcttcccagatgaccaagagagtccggctcagtgactccttcaaccctgtctacccctatgaagatgaaagcacctcccaacacccctttataaacccagggtttatttccccaaatggcttcacacaaagcccaaacggagttcttactttaaaatgtttaaccccactaacaaccacaggcggatctctacagctaaaagtgggagggggacttacagtggatgacaccaacggttttttgaaagaaaacataagtgccaccacaccactcgttaagactggtcactctataggtttaccactaggagccggattgggaacgaatgaaaataaactttgtatcaaattaggacaaggacttacattcaattcaaacaacatttgcattgatgacaatattaacaccttatggacaggagtcaaccccaccgaagccaactgtcaaatcatgaactccagtgaatctaatgattgcaaattaattctaacactagttaaaactggagcactagtcactgcatttgtttatgttataggagtatctaacaattttaatatgctaactacacacagaaatataaattttactgcagagctgtttttcgattctactggtaatttactaactagactctcatccctcaaaactccacttaatcataaatcaggacaaaacatggctactggtgccattactaatgctaaaggtttcatgcccagcacgactgcctatcctttcaatgataattctagagaaaaagaaaactacatttacggaacttgttactacacagctagtgatcgcactgcttttcccattgacatatctgtcatgcttaaccgaagagcaataaatgacgagacatcatattgtattcgtataacttggtcctggaacacaggagatgccccagaggtgcaaacctctgctacaaccctagtcacctccccatttaccttttactacatcagagaagacgactgacaaataaagtttgcgatcgccaggcccaccatgtgccaccagcagctggtgatcagctggttctctctggtgtttctggcttcccctctggtggccatctgggagctgaagaaagacgtctacgtggtcgaactcgactggtatcccgacgcccccggcgagatggtggtgctgacatgcgatacccccgaggaggatggcattacatggacactggaccaatcctccgaggtgctgggcagcggaaagacactgaccatccaagtgaaggagtttggagacgccggccagtatacatgccataaaggcggagaagtgctcagccattctctgctgctgctgcacaagaaggaagacggaatctggtccaccgacattctcaaggaccaaaaggaacccaagaacaagacctttctgagatgcgaggctaagaactacagcggaagatttacatgctggtggctgaccacaatcagcaccgatctcaccttcagcgtgaaaagcagcagaggaagcagcgaccctcaaggcgtgacatgcggagccgctacactgtccgctgaaagagtgaggggcgacaacaaggagtacgagtattccgtggagtgtcaagaggacagcgcttgccccgctgctgaggaaagcctccctattgaggtcatggtcgacgctgtgcacaagctgaagtatgagaactataccagcagcttttttattagagacatcatcaaacccgacccccccaagaatctgcagctgaagcctctgaagaactctagacaagtggaggtcagctgggagtatcccgacacatggtccaccccccacagctatttctctctgaccttttgcgtgcaagtccaaggcaaaagcaagagagaaaagaaggatagagtcttcaccgacaagacatccgctacagtgatctgcagaaagaacgcctccattagcgtgagggctcaagatagatactattccagcagctggagcgaatgggcctccgtcccttgttccggaggcggcggctccggcggaggcggctccggcggcggcggcagcagaaatctgcccgtggctacccccgaccccggcatgtttccttgtctgcaccacagccagaatctgctgagggctgtgtccaacatgctccagaaagctaggcagacactggaattctacccttgcaccagcgaggaaatcgaccacgaggacattaccaaggacaagaccagcaccgtggaggcttgtctgcctctggagctgaccaagaatgagagctgcctcaactccagagaaacatccttcatcaccaacggcagctgtctggcttctagaaagacaagcttcatgatggctctgtgcctctccagcatctacgaggacctcaagatgtaccaagtggagtttaaaaccatgaacgccaagctgctgatggatcccaaaaggcagatcttcctcgaccagaacatgctggccgtgatcgacgaactcatgcaagccctcaacttcaactccgagaccgtcccccagaagtcctctctggaggagcccgatttctacaagaccaaaatcaagctctgcattctgctccacgccttcagaattagagccgtgaccattgatagagtgatgagctacctcaacgcttccggaagcggcgagggaagaggatctctgctcacatgtggagacgtggaggaaaaccccggccccgactggacatggaggattctgtttctggtggccgctgctaccggcgctcacagcaattgggtcaacgtcatcagcgacctcaagaagatcgaggacctcatccagtccatgcacatcgacgctacactgtacaccgagtccgatgtgcaccccagctgcaaagtgaccgctatgaagtgcttcctcctcgagctgcaagtgatttccctcgagtccggcgatgcctccatccacgacacagtggagaacctcatcattctggccaacaactctctgtcctccaacggaaacgtgacagagtccggctgcaaggaatgtgaggagctggaggaaaagaatatcaaggaatttctgcagagcttcgtgcacatcgtgcagatgttcatcaatacaagcagcggcggcggaagcggaggaggcggaagcggcggaggaggctccggaggaggaggctccggcggaggctccctccagattacatgccctcctcccatgtccgtggagcacgccgacatctgggtcaagagctactctctgtactctagagagaggtacatttgcaactccggcttcaagaggaaagccggaacatcctccctcaccgaatgcgtgctgaacaaagctaccaacgtcgcccactggaccacaccctctctgaagtgcattagagactaagctagcttgactgactgagatacagcgtaccttcagctcacagacatgataagatacattgatgagtttggacaaaccacaactagaatgcagtgaaaaaaatgctttatttgtgaaatttgtgatgctattgctttatttgtaaccattataagctgcaataaacaagttaacaacaacaattgcattcattttatgtttcaggttcagggggaggtgtgggaggttttttaaagcaagtaaaacctctacaaatgtggtagtcgtcagctatcctgcaggaacttgtttatttgaaaatcaattcacaaaatccgagtagttattttgcctcccccttcccatttaacagaatacaccaatctctccccacgcacagctttaaacatttggataccattagatatagacatggttttagattccacattccaaacagtttcagagcgagccaatctggggtcagtgatagataaaaatccatcgggatagtcttttaaagcgctttcacagtccaactgctgcggatgcgactccggagtctggatcacggtcatctggaagaagaacgatgggaatcataatccgaaaacggtatcggacgattgtgtctcatcaaacccacaagcagccgctgtctgcgtcgctccgtgcgactgctgtttatgggatcagggtccacagtgtcctgaagcatgattttaatagcccttaacatcaactttctggtgcgatgcgcgcagcaacgcattctgatttcactcaaatctttgcagtaggtacaacacattattacaatattgtttaataaaccataattaaaagcgctccagccaaaactcatatctgatataatcgcccctgcatgaccatcataccaaagtttaatataaattaaatgacgttccctcaaaaacacactacccacatacatgatctcttttggcatgtgcatattaacaatctgtctgtaccatggacaacgttggttaatcatgcaacccaatataaccttccggaaccacactgccaacaccgctcccccagccatgcattgaagtgaaccctgctgattacaatgacaatgaagaacccaattctctcgaccgtgaatcacttgagaatgaaaaatatctatagtggcacaacatagacataaatgcatgcatcttctcataatttttaactcctcaggatttagaaacatatcccagggaataggaagctcttgcagaacagtaaagctggcagaacaaggaagaccacgaacacaacttacactatgcatagtcatagtatcacaatctggcaacagcgggtggtcttcagtcatagaagctcgggtttcattttcctcacaacgtggtaactgggctctggtgtaagggtgatgtctggcgcatgatgtcgagcgtgcgcgcaaccttgtcataatggagttgcttcctgacattctcgtattttgtatagcaaaacgcggccctggcagaacacactcttcttcgccttctatcctgccgcttagcgtgttccgtgtgatagttcaagtacaaccacactcttaagttggtcaaaagaatgctggcttcagttgtaatcaaaactccatcgcatctaatcgttctgaggaaatcatccaagcaatgcaactggattgtgtttcaagcaggagaggagagggaagagacggaagaaccatgttaatttttattccaaacgatctcgcagtacttcaaattgtagatcgcgcagatggcatctctcgcccccactgtgttggtgaaaaagcacagctagatcaaaagaaatgcgattttcaaggtgctcaacggtggcttccagcaaagcctccacgcgcacatccaagaacaaaagaataccaaaagaaggagcattttctaactcctcaatcatcatattacattcctgcaccattcccagataattttcagctttccagccttgaattattcgtgtcagttcttgtggtaaatccaatccacacattacaaacaggtcccggagggcgccctccaccaccattcttaaacacaccctcataatgacaaaatatcttgctcctgtgtcacctgtagcgaattgagaatggcaacatcaattgacatgcccttggctctaagttcttctttaagttctagttgtaaaaactctctcatattatcaccaaactgcttagccagaagccccccgggaacaagagcaggggacgctacagtgcagtacaagcgcagacctccccaattggctccagcaaaaacaagattggaataagcatattgggaaccgccagtaatatcatcgaagttgctggaaatataatcaggcagagtttcttgtaaaaattgaataaaagaaaaatttgccaaaaaaacattcaaaacctctgggatgcaaatgcaataggttaccgcgctgcgctccaacattgttagttttgaattagtctgcaaaaataaaaaaaaaaacaagcgtcatatcatagtagcctgacgaacagatggataaatcagtctttccatcacaagacaagccacagggtctccagctcgaccctcgtaaaacctgtcatcatgattaaacaacagcaccgaaagttcctcgcggtgaccagcatgaataattcttgatgaagcatacaatccagacatgttagcatcagttaacgagaaaaaacagccaacatagcctttgggtataattatgcttaatcgtaagtatagcaaagccacccctcgcggatacaaagtaaaaggcacaggagaataaaaaatataattatttctctgctgctgttcaggcaacgtcgcccccggtccctctaaatacacatacaaagcctcatcagccatggcttaccagacaaagtacagcgggcacacaaagcacaagctctaaagtgactctccaacctctccacaatatatatatacacaagccctaaactgacgtaatgggagtaaagtgtaaaaaatcccgccaaacccaacacacaccccgaaactgcgtcaccagggaaaagtacagtttcacttccgcaatcccaacaggcgtaacttcctctttctcacggtacgtgatatcccactaacttgcaacgtcattttcccacggtcgcaccgccccttttagccgttaaccccacagccaatcaccacacgatccacactttttaaaatcacctcatttacatattggcaccattccatctataaggtatattatatagataga

SEQ ID NO: 224 - DNA, 35524 bp, Artificial Sequence
  Genome sequence of NG-788P virus
tctatctatataatataccttatagatggaatggtgccaatatgtaaatgaggtgattttaaaaagtgtggatcgtgtggtgattggctgtggggttaacggctaaaaggggcggtgcgaccgtgggaaaatgacgttttgtgggggtggagtttttttgcaagttgtcgcgggaaatgtgacgcataaaaaggcttttttctcacggaactacttagttttcccacggtatttaacaggaaatgaggtagttttgaccggatgcaagtgaaaattgttgattttcgcgcgaaaactgaatgaggaagtgtttttctgaataatgtggtatttatggcagggtggagtatttgttcagggccaggtagactttgacccattacgtggaggtttcgattaccgtgttttttacctgaatttccgcgtaccgtgtcaaagtcttctgtttttacgtaggtgtcagctgatcgctagggtatttatacctcagggtttgtgtcaagaggccactcttgagtgccagcgagaagagttttctcctctgcgccggcagtttaataataaaaaaatgagagatttgcgatttctgcctcaggaaataatctctgctgagactggaaatgaaatattggagcttgtggtgcacgccctgatgggagacgatccggagccacctgtgcagctttttgagcctcctacgcttcaggaactgtatgatttagaggtagagggatcggaggattctaatgaggaagctgtaaatggcttttttaccgattctatgcttttagctgctaatgaagggttagaattagatccgcctttggacacttttgatactccaggggtaattgtggaaagcggtacaggtgtaagaaaattacctgatttgagttccgtggactgtgatttgcactgctatgaagacgggtttcctccgagtgatgaggaggaccatgaaaaggagcagtccatgcagactgcagcgggtgagggagtgaaggctgccaatgttggttttcagttggattgcccggagcttcctggacatggctgtaagtcttgtgaatttcacaggaaaaatactggagtaaaggaactgttatgttcgctttgttatatgagaacgcactgccactttatttacagtaagtgtgtttaagttaaaatttaaaggaatatgctgtttttcacatgtatattgagtgtgagttttgtgcttcttattataggtcctgtgtctgatgctgatgaatcaccatctcctgattctactacctcacctcctgagattcaagcacctgttcctgtggacgtgcgcaagcccattcctgtgaagcttaagcctgggaaacgtccagcagtggaaaaacttgaggacttgttacagggtggggacggacctttggacttgagtacacggaaacgtccaagacaataagtgttccatatccgtgtttacttaaggtgacgtcaatatttgtgtgacagtgcaatgtaataaaaatatgttaactgttcactggtttttattgctttttgggcggggactcaggtatataagtagaagcagacctgtgtggttagctcataggagctggctttcatccatggaggtttgggccattttggaagaccttaggaagactaggcaactgttagagaacgcttcggacggagtctccggtttttggagattctggttcgctagtgaattagctagggtagtttttaggataaaacaggactataaacaagaatttgaaaagttgttggtagattgcccaggactttttgaagctcttaatttgggccatcaggttcactttaaagaaaaagttttatcagttttagacttttcaaccccaggtagaactgctgctgctgtggcttttcttacttttatattagataaatggatcccgcagactcatttcagcaggggatacgttttggatttcatagccacagcattgtggagaacatggaaggttcgcaagatgaggacaatcttaggttactggccagtgcagcctttgggtgtagcgggaatcctgaggcatccaccggtcatgccagcggttctggaggaggaacagcaagaggacaacccgagagccggcctggaccctccagtggaggaggcggagtagctgacttgtctcctgaactgcaacgggtgcttactggatctacgtccactggacgggataggggcgttaagagggagagggcatctagtggtactgatgctagatctgagttggctttaagtttaatgagtcgcagacgtcctgaaaccatttggtggcatgaggttcagaaagagggaagggatgaagtttctgtattgcaggagaaatattcactggaacaggtgaaaacatgttggttggagcctgaggatgattgggaggtggccattaaaaattatgccaagatagctttgaggcctgataaacagtataagattactagacggattaatatccggaatgcttgttacatatctggaaatggggctgaggtggtaatagatactcaagacaaggcagttattagatgctgcatgatggatatgtggcctggggtagtcggtatggaagcagtaacttttgtaaatgttaagtttaggggagatggttataatggaatagtgtttatggccaataccaaacttatattgcatggttgtagcttttttggtttcaacaatacctgtgtagatgcctggggacaggttagtgtacggggatgtagtttctatgcgtgttggattgccacagctggcagaaccaagagtcaattgtctctgaagaaatgcatatttcaaagatgtaacctgggcattctgaatgaaggcgaagcaagggtccgccactgcgcttctacagatactggatgttttattttgattaagggaaatgccagcgtaaagcataacatgatttgcggtgcttccgatgagaggccttatcaaatgctcacttgtgctggtgggcattgtaatatgctggctactgtgcatattgtttcccatcaacgcaaaaaatggcctgtttttgatcacaatgtgatgacgaagtgtaccatgcatgcaggtgggcgtagaggaatgtttatgccttaccagtgtaacatgaatcatgtgaaagtgttgttggaaccagatgccttttccagaatgagcctaacaggaatttttgacatgaacatgcaaatctggaagatcctgaggtatgatgatacgagatcgagggtacgcgcatgcgaatgcggaggcaagcatgccaggttccagccggtgtgtgtagatgtgactgaagatctcagaccggatcatttggttattgcccgcactggagcagagttcggatccagtggagaagaaactgactaaggtgagtattgggaaaactttggggtgggattttcagatggacagattgagtaaaaatttgttttttctgtcttgcagctgtcatgagtggaaacgcttcttttaaggggggagtcttcagcccttatctgacagggcgtctcccatcctgggcaggagttcgtcagaatgttatgggatctactgtggatggaagacccgtccaacccgccaattcttcaacgctgacctatgctactttaagttcttcacctttggacgcagctgcagctgccgccgccgcttctgttgccgctaacactgtgcttggaatgggttactatggaagcatcatggctaattccacttcctctaataacccttctaccctgactcaggacaagttacttgtccttttggcccagctggaggctttgacccaacgtctgggtgaactttctcagcaggtggtcgagttgcgagtacaaactgagtctgctgtcggcacggcaaagtctaaataaaaaaatcccagaatcaatgaataaataaacaagcttgttgttgatttaaaatcaagtgtttttatttcatttttcgcgcacggtatgccctagaccaccgatctctatcattgagaactcggtggattttttccaggatcctatagaggtgggattgaatgtttagatacatgggcattaggccgtctttggggtggagatagctccattgaagggattcatgctccggggtagtgttgtaaatcacccagtcataacaaggtcgcagtgcatggtgttgcacaatatcttttagaagtaggctgattgccacagataagcccttggtgtaggtgtttacaaaccggttgagctgggatgggtgcattcggggtgaaattatgtgcattttggattggatttttaagttggcaatattgccgccaagatcccgtcttgggttcatgttatgaaggaccaccaagacggtgtatccggtacatttaggaaatttatcgtgcagcttggatggaaaagcgtggaaaaatttggagacacccttgtgtcctccaagattttccatgcactcatccatgataatagcaatggggccgtgggcagcggcgcgggcaaacacgttccgtgggtctgacacatcatagttatgttcctgagttaaatcatcataagccattttaatgaatttggggcggagagtaccagattggggtatgaatgttccttcgggccccggagcatagttcccctcacagatttgcatttcccaagctttcagttccgagggtggaatcatgtccacctggggggctatgaaaaacaccgtttctggggcgggggtgattaattgtgatgatagcaaatttctgagcaattgagatttgccacatccggtggggccataaatgattccgattacgggttgcaggtggtagtttagggaacggcaactgccgtcttctcgaagcaagggggccacctcgttcatcatttcccttacatgcatattttcccgcaccaaatccattaggaggcgctctcctcctagtgatagaagttcttgtagtgaggaaaagtttttcagcggtttcagaccgtcagccatgggcattttggagagagtttgctgcaaaagttctagtctgttccacagttcagtgatgtgttctatggcatctcgatccagcagacctcctcgtttcgcgggtttggacggctcctggaatagggtatgagacgatgggcgtccagcgctgccagggttcggtccttccagggtctcagtgttcgagtcagggttgtttccgtcacagtgaaggggtgtgcgcctgcttgggcgcttgccagggtgcgcttcagactcatcctgctggtcgaaaacttctgtcgcttggcgccctgtatgtcggccaagtagcagtttaccatgagttcgtagttgagcgcctcggctgcgtggcctttggcgcggagcttacctttggaagttttcttgcataccgggcagtataggcatttcagcgcatacaacttgggcgcaaggaaaacggattctggggagtatgcatctgcgccgcaggaggcgcaaacagtttcacattccaccagccaggttaaatccggttcattggggtcaaaaacaagttttccgccatattttttgatgcgtttcttacctttggtctccatgagttcgtgtcctcgttgagtgacaaacaggctgtccgtgtccccgtagactgattttacaggcctcttctccagtggagtgcctcggtcttcttcgtacaggaactctgaccactctgatacaaaggcgcgcgtccaggccagcacaaaggaggctatgtgggaggggtagcgatcgttgtcaaccagggggtccaccttttccaaagtatgcaaacacatgtcaccctcttcaacatccaggaatgtgattggcttgtaggtgtatttcacgtgacctggggtccccgctgggggggtataaaagggggcggttctttgctcttcctcactgtcttccggatcgctgtccaggaacgtcagctgttggggtaggtattccctctcgaaggcgggcatgacctctgcactcaggttgtcagtttctaagaacgaggaggatttgatattgacagtgccggttgagatgcctttcatgaggttttcgtccatctggtcagaaaacacaatttttttattgtcaagtttggtggcaaatgatccatacagggcgttggataaaagtttggcaatggatcgcatggtttggttcttttccttgtccgcgcgctctttggcggcgatgttgagttggacatactcgcgtgccaggcacttccattcggggaagatagttgttaattcatctggcacgattctcacttgccaccctcgattatgcaaggtaattaaatccacactggtggccacctcgcctcgaaggggttcattggtccaacagagcctacctcctttcctagaacagaaagggggaagtgggtctagcataagttcatcgggagggtctgcatccatggtaaagattcccggaagtaaatccttatcaaaatagctgatgggagtggggtcatctaaggccatttgccattctcgagctgccagtgcgcgctcatatgggttaaggggactgccccatggcatgggatgggtgagtgcagaggcatacatgccacagatgtcatagacgtagatgggatcctcaaagatgcctatgtaggttggatagcatcgcccccctctgatacttgctcgcacatagtcatatagttcatgtgatggcgctagcagccccggacccaagttggtgcgattgggtttttctgttctgtagacgatctggcgaaagatggcgtgagaattggaagagatggtgggtctttgaaaaatgttgaaatgggcatgaggtagacctacagagtctctgacaaagtgggcataagattcttgaagcttggttaccagttcggcggtgacaagtacgtctagggcgcagtagtcaagtgtttcttgaatgatgtcataacctggttggtttttcttttcccacagttcgcggttgagaaggtattcttcgcgatccttccagtactcttctagcggaaacccgtctttgtctgcacggtaagatcctagcatgtagaactgattaactgccttgtaagggcagcagcccttctctacgggtagagagtatgcttgagcagcttttcgtagcgaagcgtgagtaagggcaaaggtgtctctgaccatgactttgaggaattggtatttgaagtcgatgtcgtcacaggctccctgttcccagagttggaagtctacccgtttcttgtaggcggggttgggcaaagcgaaagtaacatcattgaagagaatcttgccggccctgggcatgaaattgcgagtgatgcgaaaaggctgtggtacttccgctcggttattgataacctgggcagctaggacgatctcgtcgaaaccgttgatgttgtgtcctacgatgtataattctatgaaacgcggcgtgcctctgacgtgaggtagcttactgagctcatcaaaggttaggtctgtggggtcagataaggcgtagtgttcgagagcccattcgtgcaggtgaggattcgctttaaggaaggaggaccagaggtccactgccagtgctgtttgtaactggtcccggtactgacgaaaatgccgtccgactgccattttttctggggtgacgcaatagaaggtttgggggtcctgccgccagcgatcccacttgagttttatggcgaggtcataggcgatgttgacgagccgctggtctccagagagtttcatgaccagcatgaaggggattagctgcttgccaaaggaccccatccaggtgtaggtttccacatcgtaggtgagaaagagcctttctgtgcgaggatgagagccaatcgggaagaactggatctcctgccaccagttggaggaatggctgttgatgtgatggaagtagaactccctgcgacgcgccgagcattcatgcttgtgcttgtacagacggccgcagtagtcgcagcgttgcacgggttgtatctcgtgaatgagttgtacctggcttcccttgacgagaaatttcagtgggaagccgaggcctggcgattgtatctcgtgctttactatgttgtctgcatcggcctgttcatcttctgtctcgatggtggtcatgctgacgagccctcgcgggaggcaagtccagacctcggcgcggcaggggcggagctcgaggacgagagcgcgcaggctggagctgtccagggtcctgagacgctgcggactcaggttagtaggcagtgtcaggagattaacttgcatgatcttttggagggcgtgcgggaggttcagatagtacttgatctcaacgggtccgttggtggagatgtcgatggcttgcagggttccgtgtcccttgggcgctaccaccgtgcccttgtttttcattttggacggcggtggctctgttgcttcttgcatgtttagaagcggtgtcgagggcgcgcaccgggcggcaggggcggctcgggacccggcggcatggctggcagtggtacgtcggcgccgcgcgcgggtaggttctggtactgcgccctgagaagactcgcatgcgcgacgacgcggcggttgacatcctggatctgacgcctctgggtgaaagctaccggccccgtgagcttgaacctgaaagagagttcaacagaatcaatctcggtatcgttgacggcggcttgcctaaggatttcttgcacgtcaccagagttgtcctggtaggcgatctccgccatgaactgctcgatctcttcctcttgaagatctccgcggcccgctctctcgacggtggccgcgaggtcgttggagatgcgcccaatgagttgagagaatgcattcatgcccgcctcgttccagacgcggctgtagaccacggcccccacgggatctctcgcgcgcatgaccacctgggcgaggttgagctccacgtggcgggtgaagaccgcatagttgcataggcgctggaaaaggtagttgagtgtggtggcgatgtgctcggtgacgaagaaatacatgatccatcgtctcagcggcatctcgctgacatcgcccagagcttccaagcgctccatggcctcgtagaagtccacggcaaaattaaaaaactgggagtttcgcgcggacacggtcaactcctcttccagaagacggataagttcggcgatggtggtgcgcacctcgcgctcgaaagcccctgggatttcttcctcaatctcttcttcttccactaacatctcttcctcttcaggtggggctgcaggaggagggggaacgcggcgacgccggcggcgcacgggcagacggtcgatgaatctttcaatgacctctccgcggcggcggcgcatggtttcagtgacggcgcggccgttctcgcgcggtcgcagagtaaaaacaccgccgcgcatctccttaaagtggtgactgggaggttctccgtttgggagggagagggcgctgattatacattttattaattggcccgtagggactgcacgcagagatctgatcgtgtcaagatccacgggatctgaaaacctttcgacgaaagcgtctaaccagtcacagtcacaaggtaggctgagtacggcttcttgtgggcgggggtggttatgtgttcggtctgggtcttctgtttcttcttcatctcgggaaggtgagacgatgctgctggtgatgaaattaaagtaggcagttctaagacggcggatggtggcgaggagcaccaggtctttgggtccggcttgctggatacgcaggcgattggccattccccaagcattatcctgacatctagcaagatctttgtagtagtcttgcatgagccgttctacgggcacttcttcctcacccgttctgccatgcatacgtgtgagtccaaatccgcgcattggttgtaccagtgccaagtcagctacgactctttcggcgaggatggcttgctgtacttgggtaagggtggcttgaaagtcatcaaaatccacaaagcggtggtaagctcctgtattaatggtgtaagcacagttggccatgactgaccagttaactgtctggtgaccagggcgcacgagctcggtgtatttaaggcgcgaataggcgcgggtgtcaaagatgtaatcgttgcaggtgcgcaccagatactggtaccctataagaaaatgcggcggtggttggcggtagagaggccatcgttctgtagctggagcgccaggggcgaggtcttccaacataaggcggtgatagccgtagatgtacctggacatccaggtgattcctgcggcggtagtagaagcccgaggaaactcgcgtacgcggttccaaatgttgcgtagcggcatgaagtagttcattgtaggcacggtttgaccagtgaggcgcgcgcagtcattgatgctctatagacacggagaaaatgaaagcgttcagcgactcgactccgtagcctggaggaacgtgaacgggttgggtcgcggtgtaccccggttcgagacttgtactcgagccggccggagccgcggctaacgtggtattggcactcccgtctcgacccagcctacaaaaatccaggatacggaatcgagtcgttttgctggtttccgaatggcagggaagtgagtcctattttttttttttgccgctcagatgcatcccgtgctgcgacagatgcgcccccaacaacagcccccctcgcagcagcagcagcagcaatcacaaaaggctgtccctgcaactactgcaactgccgccgtgagcggtgcgggacagcccgcctatgatctggacttggaagagggcgaaggactggcacgtctaggtgcgccttcacccgagcggcatccgcgagttcaactgaaaaaagattctcgcgaggcgtatgtgccccaacagaacctatttagagacagaagcggcgaggagccggaggagatgcgagcttcccgctttaacgcgggtcgtgagctgcgtcacggtttggaccgaagacgagtgttgcgggacgaggatttcgaagttgatgaaatgacagggatcagtcctgccagggcacacgtggctgcagccaaccttgtatcggcttacgagcagacagtaaaggaagagcgtaacttccaaaagtcttttaataatcatgtgcgaaccctgattgcccgcgaagaagttacccttggtttgatgcatttgtgggatttgatggaagctatcattcagaaccctactagcaaacctctgaccgcccagctgtttctggtggtgcaacacagcagagacaatgaggctttcagagaggcgctgctgaacatcaccgaacccgaggggagatggttgtatgatcttatcaacattctacagagtatcatagtgcaggagcggagcctgggcctggccgagaaggtggctgccatcaattactcggttttgagcttgggaaaatattacgctcgcaaaatctacaagactccatacgttcccatagacaaggaggtgaagatagatgggttctacatgcgcatgacgctcaaggtcttgaccctgagcgatgatcttggggtgtatcgcaatgacagaatgcatcgcgcggttagcgccagcaggaggcgcgagttaagcgacagggaactgatgcacagtttgcaaagagctctgactggagctggaaccgagggtgagaattacttcgacatgggagctgacttgcagtggcagcctagtcgcagggctctgagcgccgcgacggcaggatgtgagcttccttacatagaagaggcggatgaaggcgaggaggaagagggcgagtacttggaagactgatggcacaacccgtgttttttgctagatggaacagcaagcaccggatcccgcaatgcgggcggcgctgcagagccagccgtccggcattaactcctcggacgattggacccaggccatgcaacgtatcatggcgttgacgactcgcaaccccgaagcctttagacagcaaccccaggccaaccgtctatcggccatcatggaagctgtagtgccttcccgctctaatcccactcatgagaaggtcctggccatcgtgaacgcgttggtggagaacaaagctattcgtccagatgaggccggactggtatacaacgctctcttagaacgcgtggctcgctacaacagtagcaatgtgcaaaccaatttggaccgtatgataacagatgtacgcgaagccgtgtctcagcgcgaaaggttccagcgtgatgccaacctgggttcgctggtggcgttaaatgctttcttgagtactcagcctgctaatgtgccgcgtggtcaacaggattatactaactttttaagtgctttgagactgatggtatcagaagtacctcagagcgaagtgtatcagtccggtcctgattacttctttcagactagcagacagggcttgcagacggtaaatctgagccaagcttttaaaaaccttaaaggtttgtggggagtgcatgccccggtaggagaaagagcaaccgtgtctagcttgttaactccgaactcccgcctattattactgttggtagctcctttcaccgacagcggtagcatcgaccgtaattcctatttgggttacctactaaacctgtatcgcgaagccatagggcaaagtcaggtggacgagcagacctatcaagaaattacccaagtcagtcgcgctttgggacaggaagacactggcagtttggaagccactctgaacttcttgcttaccaatcggtctcaaaagatccctcctcaatatgctcttactgcggaggaggagaggatccttagatatgtgcagcagagcgtgggattgtttctgatgcaagagggggcaactccgactgcagcactggacatgacagcgcgaaatatggagcccagcatgtatgccagtaaccgacctttcattaacaaactgctggactacttgcacagagctgccgctatgaactctgattatttcaccaatgccatcttaaacccgcactggctgcccccacctggtttctacacgggcgaatatgacatgcccgaccctaatgacggatttctgtgggacgacgtggacagcgatgttttttcacctctttctgatcatcgcacgtggaaaaaggaaggcggcgatagaatgcattcttctgcatcgctgtccggggtcatgggtgctaccgcggctgagcccgagtctgcaagtccttttcctagtctacccttttctctacacagtgtacgtagcagcgaagtgggtagaataagtcgcccgagtttaatgggcgaagaggagtatctaaacgattccttgctcagaccggcaagagaaaaaaatttcccaaacaatggaatagaaagtttggtggataaaatgagtagatggaagacttatgctcaggatcacagagacgagcctgggatcatggggattacaagtagagcgagccgtagacgccagcgccatgacagacagaggggtcttgtgtgggacgatgaggattcggccgatgatagcagcgtgctggacttgggtgggagaggaaggggcaacccgtttgctcatttgcgccctcgcttgggtggtatgttgtaaaaaaaaataaaaaaaaaactcaccaaggccatggcgacgagcgtacgttcgttcttctttattatctgtgtctagtataatgaggcgagtcgtgctaggcggagcggtggtgtatccggagggtcctcctccttcgtacgagagcgtgatgcagcagcagcaggcgacggcggtgatgcaatccccactggaggctccctttgtgcctccgcgatacctggcacctacggagggcagaaacagcattcgttattcggaactggcacctcagtacgataccaccaggttgtatctggtggacaacaagtcggcggacattgcttctctgaactatcagaatgaccacagcaacttcttgaccacggtggtgcaaaacaatgactttacccctacggaagccagcacccagaccattaactttgatgaacgatcgcggtggggcggtcagctaaagaccatcatgcatactaacatgccaaacgtgaacgagtatatgtttagtaacaagttcaaagcgcgtgtgatggtgtccagaaaacctcccgacggtgctgcagttggggatacttatgatcacaagcaggatattttgaaatatgagtggttcgagtttactttgccagaaggcaacttttcagttactatgactattgatttgatgaacaatgccatcatagataattacttgaaagtgggtagacagaatggagtgcttgaaagtgacattggtgttaagttcgacaccaggaacttcaagctgggatgggatcccgaaaccaagttgatcatgcctggagtgtatacgtatgaagccttccatcctgacattgtcttactgcctggctgcggagtggattttaccgagagtcgtttgagcaaccttcttggtatcagaaaaaaacagccatttcaagagggttttaagattttgtatgaagatttagaaggtggtaatattccggccctcttggatgtagatgcctatgagaacagtaagaaagaacaaaaagccaaaatagaagctgctacagctgctgcagaagctaaggcaaacatagttgccagcgactctacaagggttgctaacgctggagaggtcagaggagacaattttgcgccaacacctgttccgactgcagaatcattattggccgatgtgtctgaaggaacggacgtgaaactcactattcaacctgtagaaaaagatagtaagaatagaagctataatgtgttggaagacaaaatcaacacagcctatcgcagttggtatctttcgtacaattatggcgatcccgaaaaaggagtgcgttcctggacattgctcaccacctcagatgtcacctgcggagcagagcaggtctactggtcgcttccagacatgatgaaggatcctgtcactttccgctccactagacaagtcagtaactaccctgtggtgggtgcagagcttatgcccgtcttctcaaagagcttctacaacgaacaagctgtgtactcccagcagctccgccagtccacctcgcttacgcacgtcttcaaccgctttcctgagaaccagattttaatccgtccgccggcgcccaccattaccaccgtcagtgaaaacgttcctgctctcacagatcacgggaccctgccgttgcgcagcagtatccggggagtccaacgtgtgaccgttactgacgccagacgccgcacctgtccctacgtgtacaaggcactgggcatagtcgcaccgcgcgtcctttcaagccgcactttctaaaaaaaaaaaaaatgtccattcttatctcgcccagtaataacaccggttggggtctgcgcgctccaagcaagatgtacggaggcgcacgcaaacgttctacccaacatcctgtccgtgttcgcggacattttcgcgctccatggggcgccctcaagggccgcactcgcgttcgaaccaccgtcgatgatgtaatcgatcaggtggttgccgacgcccgtaattatactcctactgcgcctacatctactgtggatgcagttattgacagtgtagtggctgacgctcgcaactatgctcgacgtaagagccggcgaaggcgcattgccagacgccaccgagctaccactgccatgcgagccgcaagagctctgctacgaagagctagacgcgtggggcgaagagccatgcttagggcggccagacgtgcagcttcgggcgccagcgccggcaggtcccgcaggcaagcagccgctgtcgcagcggcgactattgccgacatggcccaatcgcgaagaggcaatgtatactgggtgcgtgacgctgccaccggtcaacgtgtacccgtgcgcacccgtccccctcgcacttagaagatactgagcagtctccgatgttgtgtcccagcggcgaggatgtccaagcgcaaatacaaggaagaaatgctgcaggttatcgcacctgaagtctacggccaaccgttgaaggatgaaaaaaaaccccgcaaaatcaagcgggttaaaaaggacaaaaaagaagaggaagatggcgatgatgggctggcggagtttgtgcgcgagtttgccccacggcgacgcgtgcaatggcgtgggcgcaaagttcgacatgtgttgagacctggaacttcggtggtctttacacccggcgagcgttcaagcgctacttttaagcgttcctatgatgaggtgtacggggatgatgatattcttgagcaggcggctgaccgattaggcgagtttgcttatggcaagcgtagtagaataacttccaaggatgagacagtgtcgatacccttggatcatggaaatcccacccctagtcttaaaccggtcactttgcagcaagtgttacccgtaactccgcgaacaggtgttaaacgcgaaggtgaagatttgtatcccactatgcaactgatggtacccaaacgccagaagttggaggacgttttggagaaagtaaaagtggatccagatattcaacctgaggttaaagtgagacccattaagcaggtagcgcctggtctgggggtacaaactgtagacattaagattcccactgaaagtatggaagtgcaaactgaacccgcaaagcctactgccacctccactgaagtgcaaacggatccatggatgcccatgcctattacaactgacgccgccggtcccactcgaagatcccgacgaaagtacggtccagcaagtctgttgatgcccaattatgttgtacacccatctattattcctactcctggttaccgaggcactcgctactatcgcagccgaaacagtacctcccgccgtcgccgcaagacacctgcaaatcgcagtcgtcgccgtagacgcacaagcaaaccgactcccggcgccctggtgcggcaagtgtaccgcaatggtagtgcggaacctttgacactgccgcgtgcgcgttaccatccgagtatcatcacttaatcaatgttgccgctgcctccttgcagatatggccctcacttgtcgccttcgcgttcccatcactggttaccgaggaagaaactcgcgccgtagaagagggatgttgggacgcggaatgcgacgctacaggcgacggcgtgctatccgcaagcaattgcggggtggttttttaccagccttaattccaattatcgctgctgcaattggcgcgataccaggcatagcttccgtggcggttcaggcctcgcaacgacattgacattggaaaaaaacgtataaataaaaaaaaaaaaatacaatggactctgacactcctggtcctgtgactatgttttcttagagatggaagacatcaatttttcatccttggctccgcgacacggcacgaagccgtacatgggcacctggagcgacatcggcacgagccaactgaacgggggcgccttcaattggagcagtatctggagcgggcttaaaaattttggctcaaccataaaaacatacgggaacaaagcttggaacagcagtacaggacaggcgcttagaaataaacttaaagaccagaacttccaacaaaaagtagtcgatgggatagcttccggcatcaatggagtggtagatttggctaaccaggctgtgcagaaaaagataaacagtcgtttggacccgccgccagcaaccccaggtgaaatgcaagtggaggaagaaattcctccgccagaaaaacgaggcgacaagcgtccgcgtcccgatttggaagagacgctggtgacgcgcgtagatgaaccgccttcttatgaggaagcaacgaagcttggaatgcccaccactagaccgatagccccaatggccaccggggtgatgaaaccttctcagttgcatcgacccgtcaccttggatttgccccctccccctgctgctactgctgtacccgcttctaagcctgtcgctgccccgaaaccagtcgccgtagccaggtcacgtcccgggggcgctcctcgtccaaatgcgcactggcaaaatactctgaacagcatcgtgggtctaggcgtgcaaagtgtaaaacgccgtcgctgcttttaattaaatatggagtagcgcttaacttgcctatctgtgtatatgtgtcattacacgccgtcacagcagcagaggaaaaaaggaagaggtcgtgcgtcgacgctgagttactttcaagatggccaccccatcgatgctgccccaatgggcatacatgcacatcgccggacaggatgcttcggagtacctgagtccgggtctggtgcagttcgcccgcgccacagacacctacttcaatctgggaaataagtttagaaatcccaccgtagcgccgacccacgatgtgaccaccgaccgtagccagcggctcatgttgcgcttcgtgcccgttgaccgggaggacaatacatactcttacaaagtgcggtacaccctggccgtgggcgacaacagagtgctggatatggccagcacgttctttgacattaggggtgtgttggacagaggtcccagtttcaaaccctattctggtacggcttacaactccctggctcctaaaggcgctccaaatacatctcagtggattgcagaaggtgtaaaaaatacaactggtgaggaacacgtaacagaagaggaaaccaatactactacttacacttttggcaatgctcctgtaaaagctgaagctgaaattacaaaagaaggactcccagtaggtttggaagtttcagatgaagaaagtaaaccgatttatgctgataaaacatatcagccagaacctcagctgggagatgaaacttggactgaccttgatggaaaaaccgaaaagtatggaggcagggctctcaaacccgatactaagatgaaaccatgctacgggtcctttgccaaacctactaatgtgaaaggcggtcaggcaaaacaaaaaacaacggagcagccaaatcagaaagtcgaatatgatatcgacatggagttttttgatgcggcatcgcagaaaacaaacttaagtcctaaaattgtcatgtatgcagaaaatgtaaatttggaaactccagacactcatgtagtgtacaaacctggaacagaagacacaagttccgaagctaatttgggacaacaatctatgcccaacagacccaactacattggcttcagagataactttattggacttatgtactataacagtactggtaacatgggggtgctggctggtcaagcgtctcagttaaatgcagtggttgacttgcaggacagaaacacagaactttcttaccaactcttgcttgactctctgggcgacagaaccagatactttagcatgtggaatcaggctgtggacagttatgatcctgatgtacgtgttattgaaaatcatggtgtggaagatgaacttcccaactactgttttccactggacggcataggtgttccaacaaccagttacaaatcaatagttccaaatggagacaatgcgcctaattggaaggaacctgaagtaaatggaacaagtgagatcggacagggtaatttgtttgccatggaaattaaccttcaagccaatctatggcgaagtttcctttattccaatgtggctctatatctcccagactcgtacaaatacaccccgtccaatgtcactcttccagaaaacaaaaacacctacgactacatgaacgggcgggtggtgccgccatctctagtagacacctatgtgaacattggtgccaggtggtctctggatgccatggacaatgtcaacccattcaaccaccaccgtaacgctggcttgcgttaccgatccatgcttctgggtaacggacgttatgtgcctttccacatacaagtgcctcaaaaattcttcgctgttaaaaacctgctgcttctcccaggctcctacacttatgagtggaactttaggaaggatgtgaacatggttctacagagttccctcggtaacgacctgcgggtagatggcgccagcatcagtttcacgagcatcaacctctatgctacttttttccccatggctcacaacaccgcttccacccttgaagccatgctgcggaatgacaccaatgatcagtcattcaacgactacctatctgcagctaacatgctctaccccattcctgccaatgcaaccaatattcccatttccattccttctcgcaactgggcggctttcagaggctggtcatttaccagactgaaaaccaaagaaactccctctttggggtctggatttgacccctactttgtctattctggttctattccctacctggatggtaccttctacctgaaccacacttttaagaaggtttccatcatgtttgactcttcagtgagctggcctggaaatgacaggttactatctcctaacgaatttgaaataaagcgcactgtggatggcgaaggctacaacgtagcccaatgcaacatgaccaaagactggttcttggtacagatgctcgccaactacaacatcggctatcagggcttctacattccagaaggatacaaagatcgcatgtattcatttttcagaaacttccagcccatgagcaggcaggtggttgatgaggtcaattacaaagacttcaaggccgtcgccataccctaccaacacaacaactctggctttgtgggttacatggctccgaccatgcgccaaggtcaaccctatcccgctaactatccctatccactcattggaacaactgccgtaaatagtgttacgcagaaaaagttcttgtgtgacagaaccatgtggcgcataccgttctcgagcaacttcatgtctatgggggcccttacagacttgggacagaatatgctctatgccaactcagctcatgctctggacatgacctttgaggtggatcccatggatgagcccaccctgctttatcttctcttcgaagttttcgacgtggtcagagtgcatcagccacaccgcggcatcatcgaggcagtctacctgcgtacaccgttctcggccggtaacgctaccacgtaagaagcttcttgcttcttgcaaatagcagctgcaaccatggcctgcggatcccaaaacggctccagcgagcaagagctcagagccattgtccaagacctgggttgcggaccctattttttgggaacctacgataagcgcttcccggggttcatggcccccgataagctcgcctgtgccattgtaaatacggccggacgtgagacggggggagagcactggttggctttcggttggaacccacgttctaacacctgctacctttttgatccttttggattctcggatgatcgtctcaaacagatttaccagtttgaatatgagggtctcctgcgccgcagcgctcttgctaccaaggaccgctgtattacgctggaaaaatctacccagaccgtgcagggtccccgttctgccgcctgcggacttttctgctgcatgttccttcacgcctttgtgcactggcctgaccgtcccatggacggaaaccccaccatgaaattgctaactggagtgccaaacaacatgcttcattctcctaaagtccagcccaccctgtgtgacaatcaaaaagcactctaccattttcttaatacccattcgccttattttcgctcccatcgtacacacatcgaaagggccactgcgttcgaccgtatggatgttcaataatgactcatgtaaacaacgtgttcaataaacatcactttatttttttacatgtatcaaggctctgcattacttatttatttacaagtcgaatgggttctgacgagaatcagaatgacccgcaggcagtgatacgttgcggaactgatacttgggttgccacttgaattcgggaatcaccaacttgggaaccggtatatcgggcaggatgtcactccacagctttctggtcagctgcaaagctccaagcaggtcaggagccgaaatcttgaaatcacaattaggaccagtgctttgagcgcgagagttgcggtacaccggattgcagcactgaaacaccatcagcgacggatgtctcacgcttgccagcacggtgggatctgcaatcatgcccacatccagatcttcagcattggcaatgctgaacggggtcatcttgcaggtctgcctacccatggcgggcacccaattaggcttgtggttgcaatcgcagtgcagggggatcagtatcatcttggcctgatcctgtctgattcctggatacacggctctcatgaaagcatcatattgcttgaaagcctgctgggctttactaccctcggtataaaacatcccgcaggacctgctcgaaaactggttagctgcacagccggcatcattcacacagcagcgggcgtcattgttagctatttgcaccacacttctgccccagcggttttgggtgattttggttcgctcgggattctcctttaaggctcgttgtccgttctcgctggccacatccatctcgataatctgctccttctgaatcataatattgccatgcaggcacttcagcttgccctcataatcattgcagccatgaggccacaacgcacagcctgtacattcccaattatggtgggcgatctgagaaaaagaatgtatcattccctgcagaaatcttcccatcatcgtgctcagtgtcttgtgactagtgaaagttaactggatgcctcggtgctcctcgtttacgtactggtgacagatgcgcttgtattgttcgtgttgctcaggcattagtttaaaagaggttctaagttcgttatccagcctgtacttctccatcagcagacacatcacttccatgcctttctcccaagcagacaccaggggcaagctaatcggattcttaacagtgcaggcagcagctcctttagccagagggtcatctttagcgatcttctcaatgcttcttttgccatccttctcaacgatgcgcacgggcgggtagctgaaacccactgctacaagttgcgcctcttctctttcttcttcgctgtcttgactgatgtcttgcatggggatatgtttggtcttccttggcttctttttggggggtatcggaggaggaggactgtcgctccgttccggagacagggaggattgtgacgtttcgctcaccattaccaactgactgtcggtagaagaacctgaccccacacggcgacaggtgtttctcttcgggggcagaggtggaggcgattgcgaagggctgcggtccgacctggaaggcggatgactggcagaaccccttccgcgttcgggggtgtgctccctgtggcggtcgcttaactgatttccttcgcggctggccattgtgttctcctaggcagagaaacaacagacatggaaactcagccattgctgtcaacatcgccacgagtgccatcacatctcgtcctcagcgacgaggaaaaggagcagagcttaagcattccaccgcccagtcctgccaccacctctaccctagaagataaggaggtcgacgcatctcatgacatgcagaataaaaaagcgaaagagtctgagacagacatcgagcaagacccgggctatgtgacaccggtggaacacgaggaagagttgaaacgctttctagagagagaggatgaaaactgcccaaaacaacgagcagataactatcaccaagatgctggaaatagggatcagaacaccgactacctcatagggcttgacggggaagacgcgctccttaaacatctagcaagacagtcgctcatagtcaaggatgcattattggacagaactgaagtgcccatcagtgtggaagagctcagccgcgcctacgagcttaacctcttttcacctcgtactccccccaaacgtcagccaaacggcacctgcgagccaaatcctcgcttaaacttttatccagcttttgctgtgccagaagtactggctacctatcacatcttttttaaaaatcaaaaaattccagtctcctgccgcgctaatcgcacccgcgccgatgccctactcaatctgggacctggttcacgcttacctgatatagcttccttggaagaggttccaaagatcttcgagggtctgggcaataatgagactcgggccgcaaatgctctgcaaaagggagaaaatggcatggatgagcatcacagcgttctggtggaattggaaggcgataatgccagactcgcagtactcaagcgaagcatcgaggtcacacacttcgcatatcccgctgtcaacctgccccctaaagtcatgacggcggtcatggaccagttactcattaagcgcgcaagtcccctttcagaagacatgcatgacccagatgcctgtgatgagggtaaaccagtggtcagtgatgagcagctaacccgatggctgggcaccgactctcccagggatttggaagagcgtcgcaagcttatgatggccgtggtgctggttaccgtagaactagagtgtctccgacgtttctttaccgattcagaaaccttgcgcaaactcgaagagaatctgcactacacttttagacacggctttgtgcggcaggcatgcaagatatctaacgtggaactcaccaacctggtttcctacatgggtattctgcatgagaatcgcctaggacaaagcgtgctgcacagcaccctgaagggggaagcccgccgtgattacatccgcgattgtgtctatctgtacctgtgccacacgtggcaaaccggcatgggtgtatggcagcaatgtttagaagaacagaacttgaaagagcttgacaagctcttacagaaatctcttaaggttctgtggacagggttcgacgagcgcaccgtcgcttccgacctggcagacctcatcttcccagagcgtctcagggttactttgcgaaacggattgcctgactttatgagccagagcatgcttaacaattttcgctctttcatcctggaacgctccggtatcctgcccgccacctgctgcgcactgccctccgactttgtgcctctcacctaccgcgagtgccccccgccgctatggagtcactgctacctgttccgtctggccaactatctctcctaccactcggatgtgatcgaggatgtgagcggagacggcttgctggagtgtcactgccgctgcaatctgtgcacgccccaccggtccctagcttgcaacccccagttgatgagcgaaacccagataataggcacctttgaattgcaaggccccagcagccaaggcgatgggtcttctcctgggcaaagtttaaaactgaccccgggactgtggacctccgcctacttgcgcaagtttgctccggaagattaccacccctatgaaatcaagttctatgaggaccaatcacagcctccaaaggccgaactttcggcctgcgtcatcacccagggggcaattctggcccaattgcaagccatccaaaaatcccgccaagaatttctactgaaaaagggtaagggggtctaccttgacccccagaccggcgaggaactcaacacaaggttccctcaggatgtcccaacgacgagaaaacaagaagttgaaggtgcagccgccgcccccagaagatatggaggaagattgggacagtcaggcagaggaggcggaggaggacagtctggaggacagtctggaggaagacagtttggaggaggaaaacgaggaggcagaggaggtggaagaagtaaccgccgacaaacagttatcctcggctgcggagacaagcaacagcgctaccatctccgctccgagtcgaggaacccggcggcgtcccagcagtagatgggacgagaccggacgcttcccgaacccaaccagcgcttccaagaccggtaagaaggatcggcagggatacaagtcctggcgggggcataagaatgccatcatctcctgcttgcatgagtgcgggggcaacatatccttcacgcggcgctacttgctattccaccatggggtgaactttccgcgcaatgttttgcattactaccgtcacctccacagcccctactatagccagcaaatcccggcagtctcgacagataaagacagcggcggcgacctccaacagaaaaccagcagcggcagttagaaaatacacaacaagtgcagcaacaggaggattaaagattacagccaacgagccagcgcaaacccgagagttaagaaatcggatctttccaaccctgtatgccatcttccagcagagtcggggtcaagagcaggaactgaaaataaaaaaccgatctctgcgttcgctcaccagaagttgtttgtatcacaagagcgaagatcaacttcagcgcactctcgaggacgccgaggctctcttcaacaagtactgcgcgctgactcttaaagagtaggcagcgaccgcgcttattcaaaaaaggcgggaattacatcatcctcgacatgagtaaagaaattcccacgccttacatgtggagttatcaaccccaaatgggattggcggcaggcgcctcccaggactactccacccgcatgaattggctcagcgccgggccttctatgatttctcgagttaatgatatacgcgcctaccgaaaccaaatacttttggaacagtcagctcttaccaccacgccccgccaacaccttaatcccagaaattggcccgccgccctagtgtaccaggaaagtcccgctcccaccactgtattacttcctcgagacgcccaggccgaagtccaaatgactaatgcaggtgcgcagttagctggcggctccaccctatgtcgtcacaggcctcggcataatataaaacgcctgatgatcagaggccgaggtatccagctcaacgacgagtcggtgagctctccgcttggtctacgaccagacggaatctttcagattgccggctgcgggagatcttccttcacccctcgtcaggctgttctgactttggaaagttcgtcttcgcaaccccgctcgggcggaatcgggaccgttcaatttgtggaggagtttactccctctgtctacttcaaccccttctccggatctcctgggcattacccggacgagttcataccgaacttcgacgcgattagcgagtcagtggacggctacgattgatgtctggtgacgcggctgagctatctcggctgcgacatctagaccactgccgccgctttcgctgctttgcccgggaactcattgagttcatctacttcgaactccccaaggatcaccctcaaggtccggcccacggagtgcggatttctatcgaaggcaaaatagactctcgcctgcaacgaattttctcccagcggcccgtgctgatcgagcgagaccagggaaacaccacggtttccatctactgcatttgtaatcaccccggattgcatgaaagcctttgctgtcttatgtgtactgagtttaataaaaactgaattaagactctcctacggactgccgcttcttcaacccggattttacaaccagaagaacgaaacttttcctgtcgtccaggactctgttaacttcacctttcctactcacaaactagaagctcaacgactacaccgcttttccagaagcattttccctactaatactactttcaaaaccggaggtgagctccaaggtcttcctacagaaaacccttgggtggaagcgggccttgtagtgctaggaattcttgcgggtgggcttgtgattattctttgctacctatacacaccttgcttcactttcttagtggtgttgtggtattggtttaaaaaatggggcccatactagtcttgcttgttttactttcgcttttggaaccgggttctgccaattacgatccatgtctagacttcgacccagaaaactgcacacttacttttgcacccgacacaagccgcatctgtggagttcatcgcctctcttacgaacttggcccccaacgacaaaaatttacctgcatggtgggaatcaaccccatagttatcacccagcaaagtggagatactaagggttgcattcactgctcctgcgattccatcgagtgcacctacaccctgctgaagaccctatgcggcctaagagacctgctaccaatgaattaaaaaatgattaataaaaaatcacttacttgaaatcagcaataaggtctctgttgaaattttctcccagcagcacctcacttccctcttcccaactctggtattctaaaccccgttcagcggcatactttctccatactttaaaggggatgtcaaattttagctcctctcctgtacccacaatcttcatgtctttcttcccagatgaccaagagagtccggctcagtgactccttcaaccctgtctacccctatgaagatgaaagcacctcccaacacccctttataaacccagggtttatttccccaaatggcttcacacaaagcccaaacggagttcttactttaaaatgtttaaccccactaacaaccacaggcggatctctacagctaaaagtgggagggggacttacagtggatgacaccaacggttttttgaaagaaaacataagtgccaccacaccactcgttaagactggtcactctataggtttaccactaggagccggattgggaacgaatgaaaataaactttgtatcaaattaggacaaggacttacattcaattcaaacaacatttgcattgatgacaatattaacaccttatggacaggagtcaaccccaccgaagccaactgtcaaatcatgaactccagtgaatctaatgattgcaaattaattctaacactagttaaaactggagcactagtcactgcatttgtttatgttataggagtatctaacaattttaatatgctaactacacacagaaatataaattttactgcagagctgtttttcgattctactggtaatttactaactagactctcatccctcaaaactccacttaatcataaatcaggacaaaacatggctactggtgccattactaatgctaaaggtttcatgcccagcacgactgcctatcctttcaatgataattctagagaaaaagaaaactacatttacggaacttgttactacacagctagtgatcgcactgcttttcccattgacatatctgtcatgcttaaccgaagagcaataaatgacgagacatcatattgtattcgtataacttggtcctggaacacaggagatgccccagaggtgcaaacctctgctacaaccctagtcacctccccatttaccttttactacatcagagaagacgactgacaaataaagtttgcgatcgccaggcccaccatgtgccatcaacagctggtcatcagctggttttcgctggtcttcctcgcgagccctctggtggccatctgggagctgaagaaggatgtgtacgtggtggagctcgactggtacccagacgctccaggagagatggtggtcctgacttgcgacaccccagaagaggacggaatcacctggaccctcgaccaatcatccgaggtgctgggaagcgggaagacgctgactatccaagtgaaggagttcggagatgccggtcagtatacttgccataagggaggagaagtgctgagccactccctgctactgctgcataagaaggaggatggaatctggagcaccgacatcctgaaggaccaaaaagaaccaaagaacaagacctttctcagatgcgaagccaagaattactcagggcgcttcacttgctggtggctgacgaccatctcgactgacctcacctttagcgtcaagtcgtcgcgggggagctccgacccgcaaggagtgacttgcggcgcggcgactctgtcagcggagagggtcagaggagacaacaaagaatacgaatactcggtggaatgccaagaggactcagcctgccctgcagcggaggagtcgctgccgatcgaggtgatggtggatgccgtgcacaaactcaagtacgaaaactacacgtcgtcattcttcatccgggatatcatcaaacctgacccccctaagaacctgcaactaaagcctctgaaaaattcgcgccaggtggaagtgtcgtgggaataccctgacacttggtcgacgccccatagctatttctcactcactttctgcgtccaggtccagggtaaaagcaagcgggaaaaaaaggatcgcgtcttcacggataaaaccagcgcaaccgtcatctgccgcaagaacgcgtccatctcagtcagggcacaagaccgctactattcatcaagctggtccgaatgggcgtcggtgccctgctcaggcggcggaggctcaggaggaggtggaagcggaggcggaggatcgcgcaatctgccggtggcaacccctgaccccggcatgttcccgtgccttcaccattcccaaaacctgctgagagctgtgtcgaacatgctccagaaggctcgccaaactctggagttctatccgtgcacttcggaggaaatcgaccacgaagacatcactaaagacaaaaccagcaccgtggaagcatgcctgccgttggagctaaccaagaacgaatcatgcctgaactcccgcgagaccagctttatcacgaatggctcgtgcctggcaagccgcaaaacttcattcatgatggccctgtgcctgtcgtcgatctacgaggatctgaaaatgtaccaggtcgagttcaagacgatgaacgcgaaactgctaatggacccaaagcggcaaattttcctggatcaaaacatgctggcggtcatcgacgagttgatgcaggctctcaacttcaacagcgaaacggtgccacaaaagagcagcctggaggaaccagatttctacaagacgaaaattaagttgtgcatcctcctgcacgcgttcaggattcgcgctgtgactatcgaccgggtcatgtcgtacctgaacgccagcggcagcggggagggccgcgggagcctgctgacctgcggggatgtcgaggagaatccgggacctgcacagtccctagctctgtcacttctgattctggtgctggcattcggtatccctcgcacgcaaggctcggacggtggggctcaggactgctgtctaaagtacagccagagaaagatccctgccaaggtggtgcgcagctacagaaagcaggagccttcactgggctgctcgatccccgccatcctgtttctgccaagaaaaagaagccaagccgagctgtgcgccgatccgaaggaactgtgggtgcagcagctgatgcagcacctggataagaccccgtcaccccaaaagccggcacagggatgccggaaggatcggggagcctcgaagaccggaaagaagggaaagggaagcaagggttgcaagagaactgagcgcagccagaccccaaagggcccaggctccggacaatgcaccaactacgctctgctcaagttggccggagacgtggaatccaaccccggacccatggcgccacgacgggcgcgaggttgtagaaccttgggactgcctgccctccttctgcttttgcttttgcggccacccgccactcgagggataacctgtcctccgccaatgagtgttgaacatgcagacatctgggtgaagtcttatagtctttacagccgggagagatacatctgcaactcaggattcaagagaaaagcgggcacatcatccttgaccgagtgtgtgttgaacaaagcaactaatgtggcgcattggaccacaccctcactcaaatgtatcagagacggctccggggcaaccaacttctcactactcaaacaagctggggatgtggaagaaaaccccggccccatgccgctgctgctgctgttgcctctcctgtgggcgggagcactagcaaactgggtcaatgtcatttccgacctgaaaaaaatcgaggacctaatccagtccatgcacatcgacgctactctctacaccgaatcagacgtgcatccttcatgcaaagtgactgcgatgaaatgcttcctgctggaactccaagtgatctcgctggagagcggggatgcctcaattcacgataccgtggagaacctcatcatcctggcaaataactccttgagcagcaatgggaacgtgactgagtcgggttgcaaagagtgcgaagaactggaggaaaagaacattaaggagtttctgcaatcgtttgtccacatcgtgcagatgtttatcaacacctcctaggctagcttgactgactgagatacagcgtaccttcagctcacagacatgataagatacattgatgagtttggacaaaccacaactagaatgcagtgaaaaaaatgctttatttgtgaaatttgtgatgctattgctttatttgtaaccattataagctgcaataaacaagttaacaacaacaattgcattcattttatgtttcaggttcagggggaggtgtgggaggttttttaaagcaagtaaaacctctacaaatgtggtagtcgtcagctatcctgcaggaacttgtttatttgaaaatcaattcacaaaatccgagtagttattttgcctcccccttcccatttaacagaatacaccaatctctccccacgcacagctttaaacatttggataccattagatatagacatggttttagattccacattccaaacagtttcagagcgagccaatctggggtcagtgatagataaaaatccatcgggatagtcttttaaagcgctttcacagtccaactgctgcggatgcgactccggagtctggatcacggtcatctggaagaagaacgatgggaatcataatccgaaaacggtatcggacgattgtgtctcatcaaacccacaagcagccgctgtctgcgtcgctccgtgcgactgctgtttatgggatcagggtccacagtgtcctgaagcatgattttaatagcccttaacatcaactttctggtgcgatgcgcgcagcaacgcattctgatttcactcaaatctttgcagtaggtacaacacattattacaatattgtttaataaaccataattaaaagcgctccagccaaaactcatatctgatataatcgcccctgcatgaccatcataccaaagtttaatataaattaaatgacgttccctcaaaaacacactacccacatacatgatctcttttggcatgtgcatattaacaatctgtctgtaccatggacaacgttggttaatcatgcaacccaatataaccttccggaaccacactgccaacaccgctcccccagccatgcattgaagtgaaccctgctgattacaatgacaatgaagaacccaattctctcgaccgtgaatcacttgagaatgaaaaatatctatagtggcacaacatagacataaatgcatgcatcttctcataatttttaactcctcaggatttagaaacatatcccagggaataggaagctcttgcagaacagtaaagctggcagaacaaggaagaccacgaacacaacttacactatgcatagtcatagtatcacaatctggcaacagcgggtggtcttcagtcatagaagctcgggtttcattttcctcacaacgtggtaactgggctctggtgtaagggtgatgtctggcgcatgatgtcgagcgtgcgcgcaaccttgtcataatggagttgcttcctgacattctcgtattttgtatagcaaaacgcggccctggcagaacacactcttcttcgccttctatcctgccgcttagcgtgttccgtgtgatagttcaagtacaaccacactcttaagttggtcaaaagaatgctggcttcagttgtaatcaaaactccatcgcatctaatcgttctgaggaaatcatccaagcaatgcaactggattgtgtttcaagcaggagaggagagggaagagacggaagaaccatgttaatttttattccaaacgatctcgcagtacttcaaattgtagatcgcgcagatggcatctctcgcccccactgtgttggtgaaaaagcacagctagatcaaaagaaatgcgattttcaaggtgctcaacggtggcttccagcaaagcctccacgcgcacatccaagaacaaaagaataccaaaagaaggagcattttctaactcctcaatcatcatattacattcctgcaccattcccagataattttcagctttccagccttgaattattcgtgtcagttcttgtggtaaatccaatccacacattacaaacaggtcccggagggcgccctccaccaccattcttaaacacaccctcataatgacaaaatatcttgctcctgtgtcacctgtagcgaattgagaatggcaacatcaattgacatgcccttggctctaagttcttctttaagttctagttgtaaaaactctctcatattatcaccaaactgcttagccagaagccccccgggaacaagagcaggggacgctacagtgcagtacaagcgcagacctccccaattggctccagcaaaaacaagattggaataagcatattgggaaccgccagtaatatcatcgaagttgctggaaatataatcaggcagagtttcttgtaaaaattgaataaaagaaaaatttgccaaaaaaacattcaaaacctctgggatgcaaatgcaataggttaccgcgctgcgctccaacattgttagttttgaattagtctgcaaaaataaaaaaaaaaacaagcgtcatatcatagtagcctgacgaacagatggataaatcagtctttccatcacaagacaagccacagggtctccagctcgaccctcgtaaaacctgtcatcatgattaaacaacagcaccgaaagttcctcgcggtgaccagcatgaataattcttgatgaagcatacaatccagacatgttagcatcagttaacgagaaaaaacagccaacatagcctttgggtataattatgcttaatcgtaagtatagcaaagccacccctcgcggatacaaagtaaaaggcacaggagaataaaaaatataattatttctctgctgctgttcaggcaacgtcgcccccggtccctctaaatacacatacaaagcctcatcagccatggcttaccagacaaagtacagcgggcacacaaagcacaagctctaaagtgactctccaacctctccacaatatatatatacacaagccctaaactgacgtaatgggagtaaagtgtaaaaaatcccgccaaacccaacacacaccccgaaactgcgtcaccagggaaaagtacagtttcacttccgcaatcccaacaggcgtaacttcctctttctcacggtacgtgatatcccactaacttgcaacgtcattttcccacggtcgcaccgccccttttagccgttaaccccacagccaatcaccacacgatccacactttttaaaatcacctcatttacatattggcaccattccatctataaggtatattatatagataga

SEQ ID NO: 225 - DNA, 35497 bp, Artificial Sequence
  Genome sequence of NG-789P virus
tctatctatataatataccttatagatggaatggtgccaatatgtaaatgaggtgattttaaaaagtgtggatcgtgtggtgattggctgtggggttaacggctaaaaggggcggtgcgaccgtgggaaaatgacgttttgtgggggtggagtttttttgcaagttgtcgcgggaaatgtgacgcataaaaaggcttttttctcacggaactacttagttttcccacggtatttaacaggaaatgaggtagttttgaccggatgcaagtgaaaattgttgattttcgcgcgaaaactgaatgaggaagtgtttttctgaataatgtggtatttatggcagggtggagtatttgttcagggccaggtagactttgacccattacgtggaggtttcgattaccgtgttttttacctgaatttccgcgtaccgtgtcaaagtcttctgtttttacgtaggtgtcagctgatcgctagggtatttatacctcagggtttgtgtcaagaggccactcttgagtgccagcgagaagagttttctcctctgcgccggcagtttaataataaaaaaatgagagatttgcgatttctgcctcaggaaataatctctgctgagactggaaatgaaatattggagcttgtggtgcacgccctgatgggagacgatccggagccacctgtgcagctttttgagcctcctacgcttcaggaactgtatgatttagaggtagagggatcggaggattctaatgaggaagctgtaaatggcttttttaccgattctatgcttttagctgctaatgaagggttagaattagatccgcctttggacacttttgatactccaggggtaattgtggaaagcggtacaggtgtaagaaaattacctgatttgagttccgtggactgtgatttgcactgctatgaagacgggtttcctccgagtgatgaggaggaccatgaaaaggagcagtccatgcagactgcagcgggtgagggagtgaaggctgccaatgttggttttcagttggattgcccggagcttcctggacatggctgtaagtcttgtgaatttcacaggaaaaatactggagtaaaggaactgttatgttcgctttgttatatgagaacgcactgccactttatttacagtaagtgtgtttaagttaaaatttaaaggaatatgctgtttttcacatgtatattgagtgtgagttttgtgcttcttattataggtcctgtgtctgatgctgatgaatcaccatctcctgattctactacctcacctcctgagattcaagcacctgttcctgtggacgtgcgcaagcccattcctgtgaagcttaagcctgggaaacgtccagcagtggaaaaacttgaggacttgttacagggtggggacggacctttggacttgagtacacggaaacgtccaagacaataagtgttccatatccgtgtttacttaaggtgacgtcaatatttgtgtgacagtgcaatgtaataaaaatatgttaactgttcactggtttttattgctttttgggcggggactcaggtatataagtagaagcagacctgtgtggttagctcataggagctggctttcatccatggaggtttgggccattttggaagaccttaggaagactaggcaactgttagagaacgcttcggacggagtctccggtttttggagattctggttcgctagtgaattagctagggtagtttttaggataaaacaggactataaacaagaatttgaaaagttgttggtagattgcccaggactttttgaagctcttaatttgggccatcaggttcactttaaagaaaaagttttatcagttttagacttttcaaccccaggtagaactgctgctgctgtggcttttcttacttttatattagataaatggatcccgcagactcatttcagcaggggatacgttttggatttcatagccacagcattgtggagaacatggaaggttcgcaagatgaggacaatcttaggttactggccagtgcagcctttgggtgtagcgggaatcctgaggcatccaccggtcatgccagcggttctggaggaggaacagcaagaggacaacccgagagccggcctggaccctccagtggaggaggcggagtagctgacttgtctcctgaactgcaacgggtgcttactggatctacgtccactggacgggataggggcgttaagagggagagggcatctagtggtactgatgctagatctgagttggctttaagtttaatgagtcgcagacgtcctgaaaccatttggtggcatgaggttcagaaagagggaagggatgaagtttctgtattgcaggagaaatattcactggaacaggtgaaaacatgttggttggagcctgaggatgattgggaggtggccattaaaaattatgccaagatagctttgaggcctgataaacagtataagattactagacggattaatatccggaatgcttgttacatatctggaaatggggctgaggtggtaatagatactcaagacaaggcagttattagatgctgcatgatggatatgtggcctggggtagtcggtatggaagcagtaacttttgtaaatgttaagtttaggggagatggttataatggaatagtgtttatggccaataccaaacttatattgcatggttgtagcttttttggtttcaacaatacctgtgtagatgcctggggacaggttagtgtacggggatgtagtttctatgcgtgttggattgccacagctggcagaaccaagagtcaattgtctctgaagaaatgcatatttcaaagatgtaacctgggcattctgaatgaaggcgaagcaagggtccgccactgcgcttctacagatactggatgttttattttgattaagggaaatgccagcgtaaagcataacatgatttgcggtgcttccgatgagaggccttatcaaatgctcacttgtgctggtgggcattgtaatatgctggctactgtgcatattgtttcccatcaacgcaaaaaatggcctgtttttgatcacaatgtgatgacgaagtgtaccatgcatgcaggtgggcgtagaggaatgtttatgccttaccagtgtaacatgaatcatgtgaaagtgttgttggaaccagatgccttttccagaatgagcctaacaggaatttttgacatgaacatgcaaatctggaagatcctgaggtatgatgatacgagatcgagggtacgcgcatgcgaatgcggaggcaagcatgccaggttccagccggtgtgtgtagatgtgactgaagatctcagaccggatcatttggttattgcccgcactggagcagagttcggatccagtggagaagaaactgactaaggtgagtattgggaaaactttggggtgggattttcagatggacagattgagtaaaaatttgttttttctgtcttgcagctgtcatgagtggaaacgcttcttttaaggggggagtcttcagcccttatctgacagggcgtctcccatcctgggcaggagttcgtcagaatgttatgggatctactgtggatggaagacccgtccaacccgccaattcttcaacgctgacctatgctactttaagttcttcacctttggacgcagctgcagctgccgccgccgcttctgttgccgctaacactgtgcttggaatgggttactatggaagcatcatggctaattccacttcctctaataacccttctaccctgactcaggacaagttacttgtccttttggcccagctggaggctttgacccaacgtctgggtgaactttctcagcaggtggtcgagttgcgagtacaaactgagtctgctgtcggcacggcaaagtctaaataaaaaaatcccagaatcaatgaataaataaacaagcttgttgttgatttaaaatcaagtgtttttatttcatttttcgcgcacggtatgccctagaccaccgatctctatcattgagaactcggtggattttttccaggatcctatagaggtgggattgaatgtttagatacatgggcattaggccgtctttggggtggagatagctccattgaagggattcatgctccggggtagtgttgtaaatcacccagtcataacaaggtcgcagtgcatggtgttgcacaatatcttttagaagtaggctgattgccacagataagcccttggtgtaggtgtttacaaaccggttgagctgggatgggtgcattcggggtgaaattatgtgcattttggattggatttttaagttggcaatattgccgccaagatcccgtcttgggttcatgttatgaaggaccaccaagacggtgtatccggtacatttaggaaatttatcgtgcagcttggatggaaaagcgtggaaaaatttggagacacccttgtgtcctccaagattttccatgcactcatccatgataatagcaatggggccgtgggcagcggcgcgggcaaacacgttccgtgggtctgacacatcatagttatgttcctgagttaaatcatcataagccattttaatgaatttggggcggagagtaccagattggggtatgaatgttccttcgggccccggagcatagttcccctcacagatttgcatttcccaagctttcagttccgagggtggaatcatgtccacctggggggctatgaaaaacaccgtttctggggcgggggtgattaattgtgatgatagcaaatttctgagcaattgagatttgccacatccggtggggccataaatgattccgattacgggttgcaggtggtagtttagggaacggcaactgccgtcttctcgaagcaagggggccacctcgttcatcatttcccttacatgcatattttcccgcaccaaatccattaggaggcgctctcctcctagtgatagaagttcttgtagtgaggaaaagtttttcagcggtttcagaccgtcagccatgggcattttggagagagtttgctgcaaaagttctagtctgttccacagttcagtgatgtgttctatggcatctcgatccagcagacctcctcgtttcgcgggtttggacggctcctggaatagggtatgagacgatgggcgtccagcgctgccagggttcggtccttccagggtctcagtgttcgagtcagggttgtttccgtcacagtgaaggggtgtgcgcctgcttgggcgcttgccagggtgcgcttcagactcatcctgctggtcgaaaacttctgtcgcttggcgccctgtatgtcggccaagtagcagtttaccatgagttcgtagttgagcgcctcggctgcgtggcctttggcgcggagcttacctttggaagttttcttgcataccgggcagtataggcatttcagcgcatacaacttgggcgcaaggaaaacggattctggggagtatgcatctgcgccgcaggaggcgcaaacagtttcacattccaccagccaggttaaatccggttcattggggtcaaaaacaagttttccgccatattttttgatgcgtttcttacctttggtctccatgagttcgtgtcctcgttgagtgacaaacaggctgtccgtgtccccgtagactgattttacaggcctcttctccagtggagtgcctcggtcttcttcgtacaggaactctgaccactctgatacaaaggcgcgcgtccaggccagcacaaaggaggctatgtgggaggggtagcgatcgttgtcaaccagggggtccaccttttccaaagtatgcaaacacatgtcaccctcttcaacatccaggaatgtgattggcttgtaggtgtatttcacgtgacctggggtccccgctgggggggtataaaagggggcggttctttgctcttcctcactgtcttccggatcgctgtccaggaacgtcagctgttggggtaggtattccctctcgaaggcgggcatgacctctgcactcaggttgtcagtttctaagaacgaggaggatttgatattgacagtgccggttgagatgcctttcatgaggttttcgtccatctggtcagaaaacacaatttttttattgtcaagtttggtggcaaatgatccatacagggcgttggataaaagtttggcaatggatcgcatggtttggttcttttccttgtccgcgcgctctttggcggcgatgttgagttggacatactcgcgtgccaggcacttccattcggggaagatagttgttaattcatctggcacgattctcacttgccaccctcgattatgcaaggtaattaaatccacactggtggccacctcgcctcgaaggggttcattggtccaacagagcctacctcctttcctagaacagaaagggggaagtgggtctagcataagttcatcgggagggtctgcatccatggtaaagattcccggaagtaaatccttatcaaaatagctgatgggagtggggtcatctaaggccatttgccattctcgagctgccagtgcgcgctcatatgggttaaggggactgccccatggcatgggatgggtgagtgcagaggcatacatgccacagatgtcatagacgtagatgggatcctcaaagatgcctatgtaggttggatagcatcgcccccctctgatacttgctcgcacatagtcatatagttcatgtgatggcgctagcagccccggacccaagttggtgcgattgggtttttctgttctgtagacgatctggcgaaagatggcgtgagaattggaagagatggtgggtctttgaaaaatgttgaaatgggcatgaggtagacctacagagtctctgacaaagtgggcataagattcttgaagcttggttaccagttcggcggtgacaagtacgtctagggcgcagtagtcaagtgtttcttgaatgatgtcataacctggttggtttttcttttcccacagttcgcggttgagaaggtattcttcgcgatccttccagtactcttctagcggaaacccgtctttgtctgcacggtaagatcctagcatgtagaactgattaactgccttgtaagggcagcagcccttctctacgggtagagagtatgcttgagcagcttttcgtagcgaagcgtgagtaagggcaaaggtgtctctgaccatgactttgaggaattggtatttgaagtcgatgtcgtcacaggctccctgttcccagagttggaagtctacccgtttcttgtaggcggggttgggcaaagcgaaagtaacatcattgaagagaatcttgccggccctgggcatgaaattgcgagtgatgcgaaaaggctgtggtacttccgctcggttattgataacctgggcagctaggacgatctcgtcgaaaccgttgatgttgtgtcctacgatgtataattctatgaaacgcggcgtgcctctgacgtgaggtagcttactgagctcatcaaaggttaggtctgtggggtcagataaggcgtagtgttcgagagcccattcgtgcaggtgaggattcgctttaaggaaggaggaccagaggtccactgccagtgctgtttgtaactggtcccggtactgacgaaaatgccgtccgactgccattttttctggggtgacgcaatagaaggtttgggggtcctgccgccagcgatcccacttgagttttatggcgaggtcataggcgatgttgacgagccgctggtctccagagagtttcatgaccagcatgaaggggattagctgcttgccaaaggaccccatccaggtgtaggtttccacatcgtaggtgagaaagagcctttctgtgcgaggatgagagccaatcgggaagaactggatctcctgccaccagttggaggaatggctgttgatgtgatggaagtagaactccctgcgacgcgccgagcattcatgcttgtgcttgtacagacggccgcagtagtcgcagcgttgcacgggttgtatctcgtgaatgagttgtacctggcttcccttgacgagaaatttcagtgggaagccgaggcctggcgattgtatctcgtgctttactatgttgtctgcatcggcctgttcatcttctgtctcgatggtggtcatgctgacgagccctcgcgggaggcaagtccagacctcggcgcggcaggggcggagctcgaggacgagagcgcgcaggctggagctgtccagggtcctgagacgctgcggactcaggttagtaggcagtgtcaggagattaacttgcatgatcttttggagggcgtgcgggaggttcagatagtacttgatctcaacgggtccgttggtggagatgtcgatggcttgcagggttccgtgtcccttgggcgctaccaccgtgcccttgtttttcattttggacggcggtggctctgttgcttcttgcatgtttagaagcggtgtcgagggcgcgcaccgggcggcaggggcggctcgggacccggcggcatggctggcagtggtacgtcggcgccgcgcgcgggtaggttctggtactgcgccctgagaagactcgcatgcgcgacgacgcggcggttgacatcctggatctgacgcctctgggtgaaagctaccggccccgtgagcttgaacctgaaagagagttcaacagaatcaatctcggtatcgttgacggcggcttgcctaaggatttcttgcacgtcaccagagttgtcctggtaggcgatctccgccatgaactgctcgatctcttcctcttgaagatctccgcggcccgctctctcgacggtggccgcgaggtcgttggagatgcgcccaatgagttgagagaatgcattcatgcccgcctcgttccagacgcggctgtagaccacggcccccacgggatctctcgcgcgcatgaccacctgggcgaggttgagctccacgtggcgggtgaagaccgcatagttgcataggcgctggaaaaggtagttgagtgtggtggcgatgtgctcggtgacgaagaaatacatgatccatcgtctcagcggcatctcgctgacatcgcccagagcttccaagcgctccatggcctcgtagaagtccacggcaaaattaaaaaactgggagtttcgcgcggacacggtcaactcctcttccagaagacggataagttcggcgatggtggtgcgcacctcgcgctcgaaagcccctgggatttcttcctcaatctcttcttcttccactaacatctcttcctcttcaggtggggctgcaggaggagggggaacgcggcgacgccggcggcgcacgggcagacggtcgatgaatctttcaatgacctctccgcggcggcggcgcatggtttcagtgacggcgcggccgttctcgcgcggtcgcagagtaaaaacaccgccgcgcatctccttaaagtggtgactgggaggttctccgtttgggagggagagggcgctgattatacattttattaattggcccgtagggactgcacgcagagatctgatcgtgtcaagatccacgggatctgaaaacctttcgacgaaagcgtctaaccagtcacagtcacaaggtaggctgagtacggcttcttgtgggcgggggtggttatgtgttcggtctgggtcttctgtttcttcttcatctcgggaaggtgagacgatgctgctggtgatgaaattaaagtaggcagttctaagacggcggatggtggcgaggagcaccaggtctttgggtccggcttgctggatacgcaggcgattggccattccccaagcattatcctgacatctagcaagatctttgtagtagtcttgcatgagccgttctacgggcacttcttcctcacccgttctgccatgcatacgtgtgagtccaaatccgcgcattggttgtaccagtgccaagtcagctacgactctttcggcgaggatggcttgctgtacttgggtaagggtggcttgaaagtcatcaaaatccacaaagcggtggtaagctcctgtattaatggtgtaagcacagttggccatgactgaccagttaactgtctggtgaccagggcgcacgagctcggtgtatttaaggcgcgaataggcgcgggtgtcaaagatgtaatcgttgcaggtgcgcaccagatactggtaccctataagaaaatgcggcggtggttggcggtagagaggccatcgttctgtagctggagcgccaggggcgaggtcttccaacataaggcggtgatagccgtagatgtacctggacatccaggtgattcctgcggcggtagtagaagcccgaggaaactcgcgtacgcggttccaaatgttgcgtagcggcatgaagtagttcattgtaggcacggtttgaccagtgaggcgcgcgcagtcattgatgctctatagacacggagaaaatgaaagcgttcagcgactcgactccgtagcctggaggaacgtgaacgggttgggtcgcggtgtaccccggttcgagacttgtactcgagccggccggagccgcggctaacgtggtattggcactcccgtctcgacccagcctacaaaaatccaggatacggaatcgagtcgttttgctggtttccgaatggcagggaagtgagtcctattttttttttttgccgctcagatgcatcccgtgctgcgacagatgcgcccccaacaacagcccccctcgcagcagcagcagcagcaatcacaaaaggctgtccctgcaactactgcaactgccgccgtgagcggtgcgggacagcccgcctatgatctggacttggaagagggcgaaggactggcacgtctaggtgcgccttcacccgagcggcatccgcgagttcaactgaaaaaagattctcgcgaggcgtatgtgccccaacagaacctatttagagacagaagcggcgaggagccggaggagatgcgagcttcccgctttaacgcgggtcgtgagctgcgtcacggtttggaccgaagacgagtgttgcgggacgaggatttcgaagttgatgaaatgacagggatcagtcctgccagggcacacgtggctgcagccaaccttgtatcggcttacgagcagacagtaaaggaagagcgtaacttccaaaagtcttttaataatcatgtgcgaaccctgattgcccgcgaagaagttacccttggtttgatgcatttgtgggatttgatggaagctatcattcagaaccctactagcaaacctctgaccgcccagctgtttctggtggtgcaacacagcagagacaatgaggctttcagagaggcgctgctgaacatcaccgaacccgaggggagatggttgtatgatcttatcaacattctacagagtatcatagtgcaggagcggagcctgggcctggccgagaaggtggctgccatcaattactcggttttgagcttgggaaaatattacgctcgcaaaatctacaagactccatacgttcccatagacaaggaggtgaagatagatgggttctacatgcgcatgacgctcaaggtcttgaccctgagcgatgatcttggggtgtatcgcaatgacagaatgcatcgcgcggttagcgccagcaggaggcgcgagttaagcgacagggaactgatgcacagtttgcaaagagctctgactggagctggaaccgagggtgagaattacttcgacatgggagctgacttgcagtggcagcctagtcgcagggctctgagcgccgcgacggcaggatgtgagcttccttacatagaagaggcggatgaaggcgaggaggaagagggcgagtacttggaagactgatggcacaacccgtgttttttgctagatggaacagcaagcaccggatcccgcaatgcgggcggcgctgcagagccagccgtccggcattaactcctcggacgattggacccaggccatgcaacgtatcatggcgttgacgactcgcaaccccgaagcctttagacagcaaccccaggccaaccgtctatcggccatcatggaagctgtagtgccttcccgctctaatcccactcatgagaaggtcctggccatcgtgaacgcgttggtggagaacaaagctattcgtccagatgaggccggactggtatacaacgctctcttagaacgcgtggctcgctacaacagtagcaatgtgcaaaccaatttggaccgtatgataacagatgtacgcgaagccgtgtctcagcgcgaaaggttccagcgtgatgccaacctgggttcgctggtggcgttaaatgctttcttgagtactcagcctgctaatgtgccgcgtggtcaacaggattatactaactttttaagtgctttgagactgatggtatcagaagtacctcagagcgaagtgtatcagtccggtcctgattacttctttcagactagcagacagggcttgcagacggtaaatctgagccaagcttttaaaaaccttaaaggtttgtggggagtgcatgccccggtaggagaaagagcaaccgtgtctagcttgttaactccgaactcccgcctattattactgttggtagctcctttcaccgacagcggtagcatcgaccgtaattcctatttgggttacctactaaacctgtatcgcgaagccatagggcaaagtcaggtggacgagcagacctatcaagaaattacccaagtcagtcgcgctttgggacaggaagacactggcagtttggaagccactctgaacttcttgcttaccaatcggtctcaaaagatccctcctcaatatgctcttactgcggaggaggagaggatccttagatatgtgcagcagagcgtgggattgtttctgatgcaagagggggcaactccgactgcagcactggacatgacagcgcgaaatatggagcccagcatgtatgccagtaaccgacctttcattaacaaactgctggactacttgcacagagctgccgctatgaactctgattatttcaccaatgccatcttaaacccgcactggctgcccccacctggtttctacacgggcgaatatgacatgcccgaccctaatgacggatttctgtgggacgacgtggacagcgatgttttttcacctctttctgatcatcgcacgtggaaaaaggaaggcggcgatagaatgcattcttctgcatcgctgtccggggtcatgggtgctaccgcggctgagcccgagtctgcaagtccttttcctagtctacccttttctctacacagtgtacgtagcagcgaagtgggtagaataagtcgcccgagtttaatgggcgaagaggagtatctaaacgattccttgctcagaccggcaagagaaaaaaatttcccaaacaatggaatagaaagtttggtggataaaatgagtagatggaagacttatgctcaggatcacagagacgagcctgggatcatggggattacaagtagagcgagccgtagacgccagcgccatgacagacagaggggtcttgtgtgggacgatgaggattcggccgatgatagcagcgtgctggacttgggtgggagaggaaggggcaacccgtttgctcatttgcgccctcgcttgggtggtatgttgtaaaaaaaaataaaaaaaaaactcaccaaggccatggcgacgagcgtacgttcgttcttctttattatctgtgtctagtataatgaggcgagtcgtgctaggcggagcggtggtgtatccggagggtcctcctccttcgtacgagagcgtgatgcagcagcagcaggcgacggcggtgatgcaatccccactggaggctccctttgtgcctccgcgatacctggcacctacggagggcagaaacagcattcgttattcggaactggcacctcagtacgataccaccaggttgtatctggtggacaacaagtcggcggacattgcttctctgaactatcagaatgaccacagcaacttcttgaccacggtggtgcaaaacaatgactttacccctacggaagccagcacccagaccattaactttgatgaacgatcgcggtggggcggtcagctaaagaccatcatgcatactaacatgccaaacgtgaacgagtatatgtttagtaacaagttcaaagcgcgtgtgatggtgtccagaaaacctcccgacggtgctgcagttggggatacttatgatcacaagcaggatattttgaaatatgagtggttcgagtttactttgccagaaggcaacttttcagttactatgactattgatttgatgaacaatgccatcatagataattacttgaaagtgggtagacagaatggagtgcttgaaagtgacattggtgttaagttcgacaccaggaacttcaagctgggatgggatcccgaaaccaagttgatcatgcctggagtgtatacgtatgaagccttccatcctgacattgtcttactgcctggctgcggagtggattttaccgagagtcgtttgagcaaccttcttggtatcagaaaaaaacagccatttcaagagggttttaagattttgtatgaagatttagaaggtggtaatattccggccctcttggatgtagatgcctatgagaacagtaagaaagaacaaaaagccaaaatagaagctgctacagctgctgcagaagctaaggcaaacatagttgccagcgactctacaagggttgctaacgctggagaggtcagaggagacaattttgcgccaacacctgttccgactgcagaatcattattggccgatgtgtctgaaggaacggacgtgaaactcactattcaacctgtagaaaaagatagtaagaatagaagctataatgtgttggaagacaaaatcaacacagcctatcgcagttggtatctttcgtacaattatggcgatcccgaaaaaggagtgcgttcctggacattgctcaccacctcagatgtcacctgcggagcagagcaggtctactggtcgcttccagacatgatgaaggatcctgtcactttccgctccactagacaagtcagtaactaccctgtggtgggtgcagagcttatgcccgtcttctcaaagagcttctacaacgaacaagctgtgtactcccagcagctccgccagtccacctcgcttacgcacgtcttcaaccgctttcctgagaaccagattttaatccgtccgccggcgcccaccattaccaccgtcagtgaaaacgttcctgctctcacagatcacgggaccctgccgttgcgcagcagtatccggggagtccaacgtgtgaccgttactgacgccagacgccgcacctgtccctacgtgtacaaggcactgggcatagtcgcaccgcgcgtcctttcaagccgcactttctaaaaaaaaaaaaaatgtccattcttatctcgcccagtaataacaccggttggggtctgcgcgctccaagcaagatgtacggaggcgcacgcaaacgttctacccaacatcctgtccgtgttcgcggacattttcgcgctccatggggcgccctcaagggccgcactcgcgttcgaaccaccgtcgatgatgtaatcgatcaggtggttgccgacgcccgtaattatactcctactgcgcctacatctactgtggatgcagttattgacagtgtagtggctgacgctcgcaactatgctcgacgtaagagccggcgaaggcgcattgccagacgccaccgagctaccactgccatgcgagccgcaagagctctgctacgaagagctagacgcgtggggcgaagagccatgcttagggcggccagacgtgcagcttcgggcgccagcgccggcaggtcccgcaggcaagcagccgctgtcgcagcggcgactattgccgacatggcccaatcgcgaagaggcaatgtatactgggtgcgtgacgctgccaccggtcaacgtgtacccgtgcgcacccgtccccctcgcacttagaagatactgagcagtctccgatgttgtgtcccagcggcgaggatgtccaagcgcaaatacaaggaagaaatgctgcaggttatcgcacctgaagtctacggccaaccgttgaaggatgaaaaaaaaccccgcaaaatcaagcgggttaaaaaggacaaaaaagaagaggaagatggcgatgatgggctggcggagtttgtgcgcgagtttgccccacggcgacgcgtgcaatggcgtgggcgcaaagttcgacatgtgttgagacctggaacttcggtggtctttacacccggcgagcgttcaagcgctacttttaagcgttcctatgatgaggtgtacggggatgatgatattcttgagcaggcggctgaccgattaggcgagtttgcttatggcaagcgtagtagaataacttccaaggatgagacagtgtcgatacccttggatcatggaaatcccacccctagtcttaaaccggtcactttgcagcaagtgttacccgtaactccgcgaacaggtgttaaacgcgaaggtgaagatttgtatcccactatgcaactgatggtacccaaacgccagaagttggaggacgttttggagaaagtaaaagtggatccagatattcaacctgaggttaaagtgagacccattaagcaggtagcgcctggtctgggggtacaaactgtagacattaagattcccactgaaagtatggaagtgcaaactgaacccgcaaagcctactgccacctccactgaagtgcaaacggatccatggatgcccatgcctattacaactgacgccgccggtcccactcgaagatcccgacgaaagtacggtccagcaagtctgttgatgcccaattatgttgtacacccatctattattcctactcctggttaccgaggcactcgctactatcgcagccgaaacagtacctcccgccgtcgccgcaagacacctgcaaatcgcagtcgtcgccgtagacgcacaagcaaaccgactcccggcgccctggtgcggcaagtgtaccgcaatggtagtgcggaacctttgacactgccgcgtgcgcgttaccatccgagtatcatcacttaatcaatgttgccgctgcctccttgcagatatggccctcacttgtcgccttcgcgttcccatcactggttaccgaggaagaaactcgcgccgtagaagagggatgttgggacgcggaatgcgacgctacaggcgacggcgtgctatccgcaagcaattgcggggtggttttttaccagccttaattccaattatcgctgctgcaattggcgcgataccaggcatagcttccgtggcggttcaggcctcgcaacgacattgacattggaaaaaaacgtataaataaaaaaaaaaaaatacaatggactctgacactcctggtcctgtgactatgttttcttagagatggaagacatcaatttttcatccttggctccgcgacacggcacgaagccgtacatgggcacctggagcgacatcggcacgagccaactgaacgggggcgccttcaattggagcagtatctggagcgggcttaaaaattttggctcaaccataaaaacatacgggaacaaagcttggaacagcagtacaggacaggcgcttagaaataaacttaaagaccagaacttccaacaaaaagtagtcgatgggatagcttccggcatcaatggagtggtagatttggctaaccaggctgtgcagaaaaagataaacagtcgtttggacccgccgccagcaaccccaggtgaaatgcaagtggaggaagaaattcctccgccagaaaaacgaggcgacaagcgtccgcgtcccgatttggaagagacgctggtgacgcgcgtagatgaaccgccttcttatgaggaagcaacgaagcttggaatgcccaccactagaccgatagccccaatggccaccggggtgatgaaaccttctcagttgcatcgacccgtcaccttggatttgccccctccccctgctgctactgctgtacccgcttctaagcctgtcgctgccccgaaaccagtcgccgtagccaggtcacgtcccgggggcgctcctcgtccaaatgcgcactggcaaaatactctgaacagcatcgtgggtctaggcgtgcaaagtgtaaaacgccgtcgctgcttttaattaaatatggagtagcgcttaacttgcctatctgtgtatatgtgtcattacacgccgtcacagcagcagaggaaaaaaggaagaggtcgtgcgtcgacgctgagttactttcaagatggccaccccatcgatgctgccccaatgggcatacatgcacatcgccggacaggatgcttcggagtacctgagtccgggtctggtgcagttcgcccgcgccacagacacctacttcaatctgggaaataagtttagaaatcccaccgtagcgccgacccacgatgtgaccaccgaccgtagccagcggctcatgttgcgcttcgtgcccgttgaccgggaggacaatacatactcttacaaagtgcggtacaccctggccgtgggcgacaacagagtgctggatatggccagcacgttctttgacattaggggtgtgttggacagaggtcccagtttcaaaccctattctggtacggcttacaactccctggctcctaaaggcgctccaaatacatctcagtggattgcagaaggtgtaaaaaatacaactggtgaggaacacgtaacagaagaggaaaccaatactactacttacacttttggcaatgctcctgtaaaagctgaagctgaaattacaaaagaaggactcccagtaggtttggaagtttcagatgaagaaagtaaaccgatttatgctgataaaacatatcagccagaacctcagctgggagatgaaacttggactgaccttgatggaaaaaccgaaaagtatggaggcagggctctcaaacccgatactaagatgaaaccatgctacgggtcctttgccaaacctactaatgtgaaaggcggtcaggcaaaacaaaaaacaacggagcagccaaatcagaaagtcgaatatgatatcgacatggagttttttgatgcggcatcgcagaaaacaaacttaagtcctaaaattgtcatgtatgcagaaaatgtaaatttggaaactccagacactcatgtagtgtacaaacctggaacagaagacacaagttccgaagctaatttgggacaacaatctatgcccaacagacccaactacattggcttcagagataactttattggacttatgtactataacagtactggtaacatgggggtgctggctggtcaagcgtctcagttaaatgcagtggttgacttgcaggacagaaacacagaactttcttaccaactcttgcttgactctctgggcgacagaaccagatactttagcatgtggaatcaggctgtggacagttatgatcctgatgtacgtgttattgaaaatcatggtgtggaagatgaacttcccaactactgttttccactggacggcataggtgttccaacaaccagttacaaatcaatagttccaaatggagacaatgcgcctaattggaaggaacctgaagtaaatggaacaagtgagatcggacagggtaatttgtttgccatggaaattaaccttcaagccaatctatggcgaagtttcctttattccaatgtggctctatatctcccagactcgtacaaatacaccccgtccaatgtcactcttccagaaaacaaaaacacctacgactacatgaacgggcgggtggtgccgccatctctagtagacacctatgtgaacattggtgccaggtggtctctggatgccatggacaatgtcaacccattcaaccaccaccgtaacgctggcttgcgttaccgatccatgcttctgggtaacggacgttatgtgcctttccacatacaagtgcctcaaaaattcttcgctgttaaaaacctgctgcttctcccaggctcctacacttatgagtggaactttaggaaggatgtgaacatggttctacagagttccctcggtaacgacctgcgggtagatggcgccagcatcagtttcacgagcatcaacctctatgctacttttttccccatggctcacaacaccgcttccacccttgaagccatgctgcggaatgacaccaatgatcagtcattcaacgactacctatctgcagctaacatgctctaccccattcctgccaatgcaaccaatattcccatttccattccttctcgcaactgggcggctttcagaggctggtcatttaccagactgaaaaccaaagaaactccctctttggggtctggatttgacccctactttgtctattctggttctattccctacctggatggtaccttctacctgaaccacacttttaagaaggtttccatcatgtttgactcttcagtgagctggcctggaaatgacaggttactatctcctaacgaatttgaaataaagcgcactgtggatggcgaaggctacaacgtagcccaatgcaacatgaccaaagactggttcttggtacagatgctcgccaactacaacatcggctatcagggcttctacattccagaaggatacaaagatcgcatgtattcatttttcagaaacttccagcccatgagcaggcaggtggttgatgaggtcaattacaaagacttcaaggccgtcgccataccctaccaacacaacaactctggctttgtgggttacatggctccgaccatgcgccaaggtcaaccctatcccgctaactatccctatccactcattggaacaactgccgtaaatagtgttacgcagaaaaagttcttgtgtgacagaaccatgtggcgcataccgttctcgagcaacttcatgtctatgggggcccttacagacttgggacagaatatgctctatgccaactcagctcatgctctggacatgacctttgaggtggatcccatggatgagcccaccctgctttatcttctcttcgaagttttcgacgtggtcagagtgcatcagccacaccgcggcatcatcgaggcagtctacctgcgtacaccgttctcggccggtaacgctaccacgtaagaagcttcttgcttcttgcaaatagcagctgcaaccatggcctgcggatcccaaaacggctccagcgagcaagagctcagagccattgtccaagacctgggttgcggaccctattttttgggaacctacgataagcgcttcccggggttcatggcccccgataagctcgcctgtgccattgtaaatacggccggacgtgagacggggggagagcactggttggctttcggttggaacccacgttctaacacctgctacctttttgatccttttggattctcggatgatcgtctcaaacagatttaccagtttgaatatgagggtctcctgcgccgcagcgctcttgctaccaaggaccgctgtattacgctggaaaaatctacccagaccgtgcagggtccccgttctgccgcctgcggacttttctgctgcatgttccttcacgcctttgtgcactggcctgaccgtcccatggacggaaaccccaccatgaaattgctaactggagtgccaaacaacatgcttcattctcctaaagtccagcccaccctgtgtgacaatcaaaaagcactctaccattttcttaatacccattcgccttattttcgctcccatcgtacacacatcgaaagggccactgcgttcgaccgtatggatgttcaataatgactcatgtaaacaacgtgttcaataaacatcactttatttttttacatgtatcaaggctctgcattacttatttatttacaagtcgaatgggttctgacgagaatcagaatgacccgcaggcagtgatacgttgcggaactgatacttgggttgccacttgaattcgggaatcaccaacttgggaaccggtatatcgggcaggatgtcactccacagctttctggtcagctgcaaagctccaagcaggtcaggagccgaaatcttgaaatcacaattaggaccagtgctttgagcgcgagagttgcggtacaccggattgcagcactgaaacaccatcagcgacggatgtctcacgcttgccagcacggtgggatctgcaatcatgcccacatccagatcttcagcattggcaatgctgaacggggtcatcttgcaggtctgcctacccatggcgggcacccaattaggcttgtggttgcaatcgcagtgcagggggatcagtatcatcttggcctgatcctgtctgattcctggatacacggctctcatgaaagcatcatattgcttgaaagcctgctgggctttactaccctcggtataaaacatcccgcaggacctgctcgaaaactggttagctgcacagccggcatcattcacacagcagcgggcgtcattgttagctatttgcaccacacttctgccccagcggttttgggtgattttggttcgctcgggattctcctttaaggctcgttgtccgttctcgctggccacatccatctcgataatctgctccttctgaatcataatattgccatgcaggcacttcagcttgccctcataatcattgcagccatgaggccacaacgcacagcctgtacattcccaattatggtgggcgatctgagaaaaagaatgtatcattccctgcagaaatcttcccatcatcgtgctcagtgtcttgtgactagtgaaagttaactggatgcctcggtgctcctcgtttacgtactggtgacagatgcgcttgtattgttcgtgttgctcaggcattagtttaaaagaggttctaagttcgttatccagcctgtacttctccatcagcagacacatcacttccatgcctttctcccaagcagacaccaggggcaagctaatcggattcttaacagtgcaggcagcagctcctttagccagagggtcatctttagcgatcttctcaatgcttcttttgccatccttctcaacgatgcgcacgggcgggtagctgaaacccactgctacaagttgcgcctcttctctttcttcttcgctgtcttgactgatgtcttgcatggggatatgtttggtcttccttggcttctttttggggggtatcggaggaggaggactgtcgctccgttccggagacagggaggattgtgacgtttcgctcaccattaccaactgactgtcggtagaagaacctgaccccacacggcgacaggtgtttctcttcgggggcagaggtggaggcgattgcgaagggctgcggtccgacctggaaggcggatgactggcagaaccccttccgcgttcgggggtgtgctccctgtggcggtcgcttaactgatttccttcgcggctggccattgtgttctcctaggcagagaaacaacagacatggaaactcagccattgctgtcaacatcgccacgagtgccatcacatctcgtcctcagcgacgaggaaaaggagcagagcttaagcattccaccgcccagtcctgccaccacctctaccctagaagataaggaggtcgacgcatctcatgacatgcagaataaaaaagcgaaagagtctgagacagacatcgagcaagacccgggctatgtgacaccggtggaacacgaggaagagttgaaacgctttctagagagagaggatgaaaactgcccaaaacaacgagcagataactatcaccaagatgctggaaatagggatcagaacaccgactacctcatagggcttgacggggaagacgcgctccttaaacatctagcaagacagtcgctcatagtcaaggatgcattattggacagaactgaagtgcccatcagtgtggaagagctcagccgcgcctacgagcttaacctcttttcacctcgtactccccccaaacgtcagccaaacggcacctgcgagccaaatcctcgcttaaacttttatccagcttttgctgtgccagaagtactggctacctatcacatcttttttaaaaatcaaaaaattccagtctcctgccgcgctaatcgcacccgcgccgatgccctactcaatctgggacctggttcacgcttacctgatatagcttccttggaagaggttccaaagatcttcgagggtctgggcaataatgagactcgggccgcaaatgctctgcaaaagggagaaaatggcatggatgagcatcacagcgttctggtggaattggaaggcgataatgccagactcgcagtactcaagcgaagcatcgaggtcacacacttcgcatatcccgctgtcaacctgccccctaaagtcatgacggcggtcatggaccagttactcattaagcgcgcaagtcccctttcagaagacatgcatgacccagatgcctgtgatgagggtaaaccagtggtcagtgatgagcagctaacccgatggctgggcaccgactctcccagggatttggaagagcgtcgcaagcttatgatggccgtggtgctggttaccgtagaactagagtgtctccgacgtttctttaccgattcagaaaccttgcgcaaactcgaagagaatctgcactacacttttagacacggctttgtgcggcaggcatgcaagatatctaacgtggaactcaccaacctggtttcctacatgggtattctgcatgagaatcgcctaggacaaagcgtgctgcacagcaccctgaagggggaagcccgccgtgattacatccgcgattgtgtctatctgtacctgtgccacacgtggcaaaccggcatgggtgtatggcagcaatgtttagaagaacagaacttgaaagagcttgacaagctcttacagaaatctcttaaggttctgtggacagggttcgacgagcgcaccgtcgcttccgacctggcagacctcatcttcccagagcgtctcagggttactttgcgaaacggattgcctgactttatgagccagagcatgcttaacaattttcgctctttcatcctggaacgctccggtatcctgcccgccacctgctgcgcactgccctccgactttgtgcctctcacctaccgcgagtgccccccgccgctatggagtcactgctacctgttccgtctggccaactatctctcctaccactcggatgtgatcgaggatgtgagcggagacggcttgctggagtgtcactgccgctgcaatctgtgcacgccccaccggtccctagcttgcaacccccagttgatgagcgaaacccagataataggcacctttgaattgcaaggccccagcagccaaggcgatgggtcttctcctgggcaaagtttaaaactgaccccgggactgtggacctccgcctacttgcgcaagtttgctccggaagattaccacccctatgaaatcaagttctatgaggaccaatcacagcctccaaaggccgaactttcggcctgcgtcatcacccagggggcaattctggcccaattgcaagccatccaaaaatcccgccaagaatttctactgaaaaagggtaagggggtctaccttgacccccagaccggcgaggaactcaacacaaggttccctcaggatgtcccaacgacgagaaaacaagaagttgaaggtgcagccgccgcccccagaagatatggaggaagattgggacagtcaggcagaggaggcggaggaggacagtctggaggacagtctggaggaagacagtttggaggaggaaaacgaggaggcagaggaggtggaagaagtaaccgccgacaaacagttatcctcggctgcggagacaagcaacagcgctaccatctccgctccgagtcgaggaacccggcggcgtcccagcagtagatgggacgagaccggacgcttcccgaacccaaccagcgcttccaagaccggtaagaaggatcggcagggatacaagtcctggcgggggcataagaatgccatcatctcctgcttgcatgagtgcgggggcaacatatccttcacgcggcgctacttgctattccaccatggggtgaactttccgcgcaatgttttgcattactaccgtcacctccacagcccctactatagccagcaaatcccggcagtctcgacagataaagacagcggcggcgacctccaacagaaaaccagcagcggcagttagaaaatacacaacaagtgcagcaacaggaggattaaagattacagccaacgagccagcgcaaacccgagagttaagaaatcggatctttccaaccctgtatgccatcttccagcagagtcggggtcaagagcaggaactgaaaataaaaaaccgatctctgcgttcgctcaccagaagttgtttgtatcacaagagcgaagatcaacttcagcgcactctcgaggacgccgaggctctcttcaacaagtactgcgcgctgactcttaaagagtaggcagcgaccgcgcttattcaaaaaaggcgggaattacatcatcctcgacatgagtaaagaaattcccacgccttacatgtggagttatcaaccccaaatgggattggcggcaggcgcctcccaggactactccacccgcatgaattggctcagcgccgggccttctatgatttctcgagttaatgatatacgcgcctaccgaaaccaaatacttttggaacagtcagctcttaccaccacgccccgccaacaccttaatcccagaaattggcccgccgccctagtgtaccaggaaagtcccgctcccaccactgtattacttcctcgagacgcccaggccgaagtccaaatgactaatgcaggtgcgcagttagctggcggctccaccctatgtcgtcacaggcctcggcataatataaaacgcctgatgatcagaggccgaggtatccagctcaacgacgagtcggtgagctctccgcttggtctacgaccagacggaatctttcagattgccggctgcgggagatcttccttcacccctcgtcaggctgttctgactttggaaagttcgtcttcgcaaccccgctcgggcggaatcgggaccgttcaatttgtggaggagtttactccctctgtctacttcaaccccttctccggatctcctgggcattacccggacgagttcataccgaacttcgacgcgattagcgagtcagtggacggctacgattgatgtctggtgacgcggctgagctatctcggctgcgacatctagaccactgccgccgctttcgctgctttgcccgggaactcattgagttcatctacttcgaactccccaaggatcaccctcaaggtccggcccacggagtgcggatttctatcgaaggcaaaatagactctcgcctgcaacgaattttctcccagcggcccgtgctgatcgagcgagaccagggaaacaccacggtttccatctactgcatttgtaatcaccccggattgcatgaaagcctttgctgtcttatgtgtactgagtttaataaaaactgaattaagactctcctacggactgccgcttcttcaacccggattttacaaccagaagaacgaaacttttcctgtcgtccaggactctgttaacttcacctttcctactcacaaactagaagctcaacgactacaccgcttttccagaagcattttccctactaatactactttcaaaaccggaggtgagctccaaggtcttcctacagaaaacccttgggtggaagcgggccttgtagtgctaggaattcttgcgggtgggcttgtgattattctttgctacctatacacaccttgcttcactttcttagtggtgttgtggtattggtttaaaaaatggggcccatactagtcttgcttgttttactttcgcttttggaaccgggttctgccaattacgatccatgtctagacttcgacccagaaaactgcacacttacttttgcacccgacacaagccgcatctgtggagttcatcgcctctcttacgaacttggcccccaacgacaaaaatttacctgcatggtgggaatcaaccccatagttatcacccagcaaagtggagatactaagggttgcattcactgctcctgcgattccatcgagtgcacctacaccctgctgaagaccctatgcggcctaagagacctgctaccaatgaattaaaaaatgattaataaaaaatcacttacttgaaatcagcaataaggtctctgttgaaattttctcccagcagcacctcacttccctcttcccaactctggtattctaaaccccgttcagcggcatactttctccatactttaaaggggatgtcaaattttagctcctctcctgtacccacaatcttcatgtctttcttcccagatgaccaagagagtccggctcagtgactccttcaaccctgtctacccctatgaagatgaaagcacctcccaacacccctttataaacccagggtttatttccccaaatggcttcacacaaagcccaaacggagttcttactttaaaatgtttaaccccactaacaaccacaggcggatctctacagctaaaagtgggagggggacttacagtggatgacaccaacggttttttgaaagaaaacataagtgccaccacaccactcgttaagactggtcactctataggtttaccactaggagccggattgggaacgaatgaaaataaactttgtatcaaattaggacaaggacttacattcaattcaaacaacatttgcattgatgacaatattaacaccttatggacaggagtcaaccccaccgaagccaactgtcaaatcatgaactccagtgaatctaatgattgcaaattaattctaacactagttaaaactggagcactagtcactgcatttgtttatgttataggagtatctaacaattttaatatgctaactacacacagaaatataaattttactgcagagctgtttttcgattctactggtaatttactaactagactctcatccctcaaaactccacttaatcataaatcaggacaaaacatggctactggtgccattactaatgctaaaggtttcatgcccagcacgactgcctatcctttcaatgataattctagagaaaaagaaaactacatttacggaacttgttactacacagctagtgatcgcactgcttttcccattgacatatctgtcatgcttaaccgaagagcaataaatgacgagacatcatattgtattcgtataacttggtcctggaacacaggagatgccccagaggtgcaaacctctgctacaaccctagtcacctccccatttaccttttactacatcagagaagacgactgacaaataaagtttgcgatcgccaggcccaccatgtgccatcaacagctggtcatcagctggttttcgctggtcttcctcgcgagccctctggtggccatctgggagctgaagaaggatgtgtacgtggtggagctcgactggtacccagacgctccaggagagatggtggtcctgacttgcgacaccccagaagaggacggaatcacctggaccctcgaccaatcatccgaggtgctgggaagcgggaagacgctgactatccaagtgaaggagttcggagatgccggtcagtatacttgccataagggaggagaagtgctgagccactccctgctactgctgcataagaaggaggatggaatctggagcaccgacatcctgaaggaccaaaaagaaccaaagaacaagacctttctcagatgcgaagccaagaattactcagggcgcttcacttgctggtggctgacgaccatctcgactgacctcacctttagcgtcaagtcgtcgcgggggagctccgacccgcaaggagtgacttgcggcgcggcgactctgtcagcggagagggtcagaggagacaacaaagaatacgaatactcggtggaatgccaagaggactcagcctgccctgcagcggaggagtcgctgccgatcgaggtgatggtggatgccgtgcacaaactcaagtacgaaaactacacgtcgtcattcttcatccgggatatcatcaaacctgacccccctaagaacctgcaactaaagcctctgaaaaattcgcgccaggtggaagtgtcgtgggaataccctgacacttggtcgacgccccatagctatttctcactcactttctgcgtccaggtccagggtaaaagcaagcgggaaaaaaaggatcgcgtcttcacggataaaaccagcgcaaccgtcatctgccgcaagaacgcgtccatctcagtcagggcacaagaccgctactattcatcaagctggtccgaatgggcgtcggtgccctgctcaggcggcggaggctcaggaggaggtggaagcggaggcggaggatcgcgcaatctgccggtggcaacccctgaccccggcatgttcccgtgccttcaccattcccaaaacctgctgagagctgtgtcgaacatgctccagaaggctcgccaaactctggagttctatccgtgcacttcggaggaaatcgaccacgaagacatcactaaagacaaaaccagcaccgtggaagcatgcctgccgttggagctaaccaagaacgaatcatgcctgaactcccgcgagaccagctttatcacgaatggctcgtgcctggcaagccgcaaaacttcattcatgatggccctgtgcctgtcgtcgatctacgaggatctgaaaatgtaccaggtcgagttcaagacgatgaacgcgaaactgctaatggacccaaagcggcaaattttcctggatcaaaacatgctggcggtcatcgacgagttgatgcaggctctcaacttcaacagcgaaacggtgccacaaaagagcagcctggaggaaccagatttctacaagacgaaaattaagttgtgcatcctcctgcacgcgttcaggattcgcgctgtgactatcgaccgggtcatgtcgtacctgaacgccagcggcagcggggagggccgcgggagcctgctgacctgcggggatgtcgaggagaatccgggacctaaaaaatccggagtgctctttctcctggggatcatcctactcgtcctcattggtgtgcaggggaccccggtcgtccgcaaaggacggtgctcgtgcatttccaccaatcagggcaccattcacctacaatcgctgaaggatctcaagcagttcgctccgtccccatcatgcgaaaagatcgagatcatcgccaccctgaagaatggagtccagacctgcttgaacccggactccgccgatgtcaaagagctgatcaaaaaatgggaaaagcaagtctcgcaaaagaaaaaacagaaaaatggaaagaaacaccaaaagaagaaggtcctcaaagtcagaaagagccagaggagccgccagaagaagacgacgggctccggacaatgcaccaactacgctctgctcaagttggccggagacgtggaatccaaccccggacccatggcgccacgacgggcgcgaggttgtagaaccttgggactgcctgccctccttctgcttttgcttttgcggccacccgccactcgagggataacctgtcctccgccaatgagtgttgaacatgcagacatctgggtgaagtcttatagtctttacagccgggagagatacatctgcaactcaggattcaagagaaaagcgggcacatcatccttgaccgagtgtgtgttgaacaaagcaactaatgtggcgcattggaccacaccctcactcaaatgtatcagagacggctccggggcaaccaacttctcactactcaaacaagctggggatgtggaagaaaaccccggccccatgccgctgctgctgctgttgcctctcctgtgggcgggagcactagcaaactgggtcaatgtcatttccgacctgaaaaaaatcgaggacctaatccagtccatgcacatcgacgctactctctacaccgaatcagacgtgcatccttcatgcaaagtgactgcgatgaaatgcttcctgctggaactccaagtgatctcgctggagagcggggatgcctcaattcacgataccgtggagaacctcatcatcctggcaaataactccttgagcagcaatgggaacgtgactgagtcgggttgcaaagagtgcgaagaactggaggaaaagaacattaaggagtttctgcaatcgtttgtccacatcgtgcagatgtttatcaacacctcctaggctagcttgactgactgagatacagcgtaccttcagctcacagacatgataagatacattgatgagtttggacaaaccacaactagaatgcagtgaaaaaaatgctttatttgtgaaatttgtgatgctattgctttatttgtaaccattataagctgcaataaacaagttaacaacaacaattgcattcattttatgtttcaggttcagggggaggtgtgggaggttttttaaagcaagtaaaacctctacaaatgtggtagtcgtcagctatcctgcaggaacttgtttatttgaaaatcaattcacaaaatccgagtagttattttgcctcccccttcccatttaacagaatacaccaatctctccccacgcacagctttaaacatttggataccattagatatagacatggttttagattccacattccaaacagtttcagagcgagccaatctggggtcagtgatagataaaaatccatcgggatagtcttttaaagcgctttcacagtccaactgctgcggatgcgactccggagtctggatcacggtcatctggaagaagaacgatgggaatcataatccgaaaacggtatcggacgattgtgtctcatcaaacccacaagcagccgctgtctgcgtcgctccgtgcgactgctgtttatgggatcagggtccacagtgtcctgaagcatgattttaatagcccttaacatcaactttctggtgcgatgcgcgcagcaacgcattctgatttcactcaaatctttgcagtaggtacaacacattattacaatattgtttaataaaccataattaaaagcgctccagccaaaactcatatctgatataatcgcccctgcatgaccatcataccaaagtttaatataaattaaatgacgttccctcaaaaacacactacccacatacatgatctcttttggcatgtgcatattaacaatctgtctgtaccatggacaacgttggttaatcatgcaacccaatataaccttccggaaccacactgccaacaccgctcccccagccatgcattgaagtgaaccctgctgattacaatgacaatgaagaacccaattctctcgaccgtgaatcacttgagaatgaaaaatatctatagtggcacaacatagacataaatgcatgcatcttctcataatttttaactcctcaggatttagaaacatatcccagggaataggaagctcttgcagaacagtaaagctggcagaacaaggaagaccacgaacacaacttacactatgcatagtcatagtatcacaatctggcaacagcgggtggtcttcagtcatagaagctcgggtttcattttcctcacaacgtggtaactgggctctggtgtaagggtgatgtctggcgcatgatgtcgagcgtgcgcgcaaccttgtcataatggagttgcttcctgacattctcgtattttgtatagcaaaacgcggccctggcagaacacactcttcttcgccttctatcctgccgcttagcgtgttccgtgtgatagttcaagtacaaccacactcttaagttggtcaaaagaatgctggcttcagttgtaatcaaaactccatcgcatctaatcgttctgaggaaatcatccaagcaatgcaactggattgtgtttcaagcaggagaggagagggaagagacggaagaaccatgttaatttttattccaaacgatctcgcagtacttcaaattgtagatcgcgcagatggcatctctcgcccccactgtgttggtgaaaaagcacagctagatcaaaagaaatgcgattttcaaggtgctcaacggtggcttccagcaaagcctccacgcgcacatccaagaacaaaagaataccaaaagaaggagcattttctaactcctcaatcatcatattacattcctgcaccattcccagataattttcagctttccagccttgaattattcgtgtcagttcttgtggtaaatccaatccacacattacaaacaggtcccggagggcgccctccaccaccattcttaaacacaccctcataatgacaaaatatcttgctcctgtgtcacctgtagcgaattgagaatggcaacatcaattgacatgcccttggctctaagttcttctttaagttctagttgtaaaaactctctcatattatcaccaaactgcttagccagaagccccccgggaacaagagcaggggacgctacagtgcagtacaagcgcagacctccccaattggctccagcaaaaacaagattggaataagcatattgggaaccgccagtaatatcatcgaagttgctggaaatataatcaggcagagtttcttgtaaaaattgaataaaagaaaaatttgccaaaaaaacattcaaaacctctgggatgcaaatgcaataggttaccgcgctgcgctccaacattgttagttttgaattagtctgcaaaaataaaaaaaaaaacaagcgtcatatcatagtagcctgacgaacagatggataaatcagtctttccatcacaagacaagccacagggtctccagctcgaccctcgtaaaacctgtcatcatgattaaacaacagcaccgaaagttcctcgcggtgaccagcatgaataattcttgatgaagcatacaatccagacatgttagcatcagttaacgagaaaaaacagccaacatagcctttgggtataattatgcttaatcgtaagtatagcaaagccacccctcgcggatacaaagtaaaaggcacaggagaataaaaaatataattatttctctgctgctgttcaggcaacgtcgcccccggtccctctaaatacacatacaaagcctcatcagccatggcttaccagacaaagtacagcgggcacacaaagcacaagctctaaagtgactctccaacctctccacaatatatatatacacaagccctaaactgacgtaatgggagtaaagtgtaaaaaatcccgccaaacccaacacacaccccgaaactgcgtcaccagggaaaagtacagtttcacttccgcaatcccaacaggcgtaacttcctctttctcacggtacgtgatatcccactaacttgcaacgtcattttcccacggtcgcaccgccccttttagccgttaaccccacagccaatcaccacacgatccacactttttaaaatcacctcatttacatattggcaccattccatctataaggtatattatatagataga

SEQ ID NO: 226 - DNA, 35971 bp, Artificial Sequence
  Genome sequence of NG-790P virus
tctatctatataatataccttatagatggaatggtgccaatatgtaaatgaggtgattttaaaaagtgtggatcgtgtggtgattggctgtggggttaacggctaaaaggggcggtgcgaccgtgggaaaatgacgttttgtgggggtggagtttttttgcaagttgtcgcgggaaatgtgacgcataaaaaggcttttttctcacggaactacttagttttcccacggtatttaacaggaaatgaggtagttttgaccggatgcaagtgaaaattgttgattttcgcgcgaaaactgaatgaggaagtgtttttctgaataatgtggtatttatggcagggtggagtatttgttcagggccaggtagactttgacccattacgtggaggtttcgattaccgtgttttttacctgaatttccgcgtaccgtgtcaaagtcttctgtttttacgtaggtgtcagctgatcgctagggtatttatacctcagggtttgtgtcaagaggccactcttgagtgccagcgagaagagttttctcctctgcgccggcagtttaataataaaaaaatgagagatttgcgatttctgcctcaggaaataatctctgctgagactggaaatgaaatattggagcttgtggtgcacgccctgatgggagacgatccggagccacctgtgcagctttttgagcctcctacgcttcaggaactgtatgatttagaggtagagggatcggaggattctaatgaggaagctgtaaatggcttttttaccgattctatgcttttagctgctaatgaagggttagaattagatccgcctttggacacttttgatactccaggggtaattgtggaaagcggtacaggtgtaagaaaattacctgatttgagttccgtggactgtgatttgcactgctatgaagacgggtttcctccgagtgatgaggaggaccatgaaaaggagcagtccatgcagactgcagcgggtgagggagtgaaggctgccaatgttggttttcagttggattgcccggagcttcctggacatggctgtaagtcttgtgaatttcacaggaaaaatactggagtaaaggaactgttatgttcgctttgttatatgagaacgcactgccactttatttacagtaagtgtgtttaagttaaaatttaaaggaatatgctgtttttcacatgtatattgagtgtgagttttgtgcttcttattataggtcctgtgtctgatgctgatgaatcaccatctcctgattctactacctcacctcctgagattcaagcacctgttcctgtggacgtgcgcaagcccattcctgtgaagcttaagcctgggaaacgtccagcagtggaaaaacttgaggacttgttacagggtggggacggacctttggacttgagtacacggaaacgtccaagacaataagtgttccatatccgtgtttacttaaggtgacgtcaatatttgtgtgacagtgcaatgtaataaaaatatgttaactgttcactggtttttattgctttttgggcggggactcaggtatataagtagaagcagacctgtgtggttagctcataggagctggctttcatccatggaggtttgggccattttggaagaccttaggaagactaggcaactgttagagaacgcttcggacggagtctccggtttttggagattctggttcgctagtgaattagctagggtagtttttaggataaaacaggactataaacaagaatttgaaaagttgttggtagattgcccaggactttttgaagctcttaatttgggccatcaggttcactttaaagaaaaagttttatcagttttagacttttcaaccccaggtagaactgctgctgctgtggcttttcttacttttatattagataaatggatcccgcagactcatttcagcaggggatacgttttggatttcatagccacagcattgtggagaacatggaaggttcgcaagatgaggacaatcttaggttactggccagtgcagcctttgggtgtagcgggaatcctgaggcatccaccggtcatgccagcggttctggaggaggaacagcaagaggacaacccgagagccggcctggaccctccagtggaggaggcggagtagctgacttgtctcctgaactgcaacgggtgcttactggatctacgtccactggacgggataggggcgttaagagggagagggcatctagtggtactgatgctagatctgagttggctttaagtttaatgagtcgcagacgtcctgaaaccatttggtggcatgaggttcagaaagagggaagggatgaagtttctgtattgcaggagaaatattcactggaacaggtgaaaacatgttggttggagcctgaggatgattgggaggtggccattaaaaattatgccaagatagctttgaggcctgataaacagtataagattactagacggattaatatccggaatgcttgttacatatctggaaatggggctgaggtggtaatagatactcaagacaaggcagttattagatgctgcatgatggatatgtggcctggggtagtcggtatggaagcagtaacttttgtaaatgttaagtttaggggagatggttataatggaatagtgtttatggccaataccaaacttatattgcatggttgtagcttttttggtttcaacaatacctgtgtagatgcctggggacaggttagtgtacggggatgtagtttctatgcgtgttggattgccacagctggcagaaccaagagtcaattgtctctgaagaaatgcatatttcaaagatgtaacctgggcattctgaatgaaggcgaagcaagggtccgccactgcgcttctacagatactggatgttttattttgattaagggaaatgccagcgtaaagcataacatgatttgcggtgcttccgatgagaggccttatcaaatgctcacttgtgctggtgggcattgtaatatgctggctactgtgcatattgtttcccatcaacgcaaaaaatggcctgtttttgatcacaatgtgatgacgaagtgtaccatgcatgcaggtgggcgtagaggaatgtttatgccttaccagtgtaacatgaatcatgtgaaagtgttgttggaaccagatgccttttccagaatgagcctaacaggaatttttgacatgaacatgcaaatctggaagatcctgaggtatgatgatacgagatcgagggtacgcgcatgcgaatgcggaggcaagcatgccaggttccagccggtgtgtgtagatgtgactgaagatctcagaccggatcatttggttattgcccgcactggagcagagttcggatccagtggagaagaaactgactaaggtgagtattgggaaaactttggggtgggattttcagatggacagattgagtaaaaatttgttttttctgtcttgcagctgtcatgagtggaaacgcttcttttaaggggggagtcttcagcccttatctgacagggcgtctcccatcctgggcaggagttcgtcagaatgttatgggatctactgtggatggaagacccgtccaacccgccaattcttcaacgctgacctatgctactttaagttcttcacctttggacgcagctgcagctgccgccgccgcttctgttgccgctaacactgtgcttggaatgggttactatggaagcatcatggctaattccacttcctctaataacccttctaccctgactcaggacaagttacttgtccttttggcccagctggaggctttgacccaacgtctgggtgaactttctcagcaggtggtcgagttgcgagtacaaactgagtctgctgtcggcacggcaaagtctaaataaaaaaatcccagaatcaatgaataaataaacaagcttgttgttgatttaaaatcaagtgtttttatttcatttttcgcgcacggtatgccctagaccaccgatctctatcattgagaactcggtggattttttccaggatcctatagaggtgggattgaatgtttagatacatgggcattaggccgtctttggggtggagatagctccattgaagggattcatgctccggggtagtgttgtaaatcacccagtcataacaaggtcgcagtgcatggtgttgcacaatatcttttagaagtaggctgattgccacagataagcccttggtgtaggtgtttacaaaccggttgagctgggatgggtgcattcggggtgaaattatgtgcattttggattggatttttaagttggcaatattgccgccaagatcccgtcttgggttcatgttatgaaggaccaccaagacggtgtatccggtacatttaggaaatttatcgtgcagcttggatggaaaagcgtggaaaaatttggagacacccttgtgtcctccaagattttccatgcactcatccatgataatagcaatggggccgtgggcagcggcgcgggcaaacacgttccgtgggtctgacacatcatagttatgttcctgagttaaatcatcataagccattttaatgaatttggggcggagagtaccagattggggtatgaatgttccttcgggccccggagcatagttcccctcacagatttgcatttcccaagctttcagttccgagggtggaatcatgtccacctggggggctatgaaaaacaccgtttctggggcgggggtgattaattgtgatgatagcaaatttctgagcaattgagatttgccacatccggtggggccataaatgattccgattacgggttgcaggtggtagtttagggaacggcaactgccgtcttctcgaagcaagggggccacctcgttcatcatttcccttacatgcatattttcccgcaccaaatccattaggaggcgctctcctcctagtgatagaagttcttgtagtgaggaaaagtttttcagcggtttcagaccgtcagccatgggcattttggagagagtttgctgcaaaagttctagtctgttccacagttcagtgatgtgttctatggcatctcgatccagcagacctcctcgtttcgcgggtttggacggctcctggaatagggtatgagacgatgggcgtccagcgctgccagggttcggtccttccagggtctcagtgttcgagtcagggttgtttccgtcacagtgaaggggtgtgcgcctgcttgggcgcttgccagggtgcgcttcagactcatcctgctggtcgaaaacttctgtcgcttggcgccctgtatgtcggccaagtagcagtttaccatgagttcgtagttgagcgcctcggctgcgtggcctttggcgcggagcttacctttggaagttttcttgcataccgggcagtataggcatttcagcgcatacaacttgggcgcaaggaaaacggattctggggagtatgcatctgcgccgcaggaggcgcaaacagtttcacattccaccagccaggttaaatccggttcattggggtcaaaaacaagttttccgccatattttttgatgcgtttcttacctttggtctccatgagttcgtgtcctcgttgagtgacaaacaggctgtccgtgtccccgtagactgattttacaggcctcttctccagtggagtgcctcggtcttcttcgtacaggaactctgaccactctgatacaaaggcgcgcgtccaggccagcacaaaggaggctatgtgggaggggtagcgatcgttgtcaaccagggggtccaccttttccaaagtatgcaaacacatgtcaccctcttcaacatccaggaatgtgattggcttgtaggtgtatttcacgtgacctggggtccccgctgggggggtataaaagggggcggttctttgctcttcctcactgtcttccggatcgctgtccaggaacgtcagctgttggggtaggtattccctctcgaaggcgggcatgacctctgcactcaggttgtcagtttctaagaacgaggaggatttgatattgacagtgccggttgagatgcctttcatgaggttttcgtccatctggtcagaaaacacaatttttttattgtcaagtttggtggcaaatgatccatacagggcgttggataaaagtttggcaatggatcgcatggtttggttcttttccttgtccgcgcgctctttggcggcgatgttgagttggacatactcgcgtgccaggcacttccattcggggaagatagttgttaattcatctggcacgattctcacttgccaccctcgattatgcaaggtaattaaatccacactggtggccacctcgcctcgaaggggttcattggtccaacagagcctacctcctttcctagaacagaaagggggaagtgggtctagcataagttcatcgggagggtctgcatccatggtaaagattcccggaagtaaatccttatcaaaatagctgatgggagtggggtcatctaaggccatttgccattctcgagctgccagtgcgcgctcatatgggttaaggggactgccccatggcatgggatgggtgagtgcagaggcatacatgccacagatgtcatagacgtagatgggatcctcaaagatgcctatgtaggttggatagcatcgcccccctctgatacttgctcgcacatagtcatatagttcatgtgatggcgctagcagccccggacccaagttggtgcgattgggtttttctgttctgtagacgatctggcgaaagatggcgtgagaattggaagagatggtgggtctttgaaaaatgttgaaatgggcatgaggtagacctacagagtctctgacaaagtgggcataagattcttgaagcttggttaccagttcggcggtgacaagtacgtctagggcgcagtagtcaagtgtttcttgaatgatgtcataacctggttggtttttcttttcccacagttcgcggttgagaaggtattcttcgcgatccttccagtactcttctagcggaaacccgtctttgtctgcacggtaagatcctagcatgtagaactgattaactgccttgtaagggcagcagcccttctctacgggtagagagtatgcttgagcagcttttcgtagcgaagcgtgagtaagggcaaaggtgtctctgaccatgactttgaggaattggtatttgaagtcgatgtcgtcacaggctccctgttcccagagttggaagtctacccgtttcttgtaggcggggttgggcaaagcgaaagtaacatcattgaagagaatcttgccggccctgggcatgaaattgcgagtgatgcgaaaaggctgtggtacttccgctcggttattgataacctgggcagctaggacgatctcgtcgaaaccgttgatgttgtgtcctacgatgtataattctatgaaacgcggcgtgcctctgacgtgaggtagcttactgagctcatcaaaggttaggtctgtggggtcagataaggcgtagtgttcgagagcccattcgtgcaggtgaggattcgctttaaggaaggaggaccagaggtccactgccagtgctgtttgtaactggtcccggtactgacgaaaatgccgtccgactgccattttttctggggtgacgcaatagaaggtttgggggtcctgccgccagcgatcccacttgagttttatggcgaggtcataggcgatgttgacgagccgctggtctccagagagtttcatgaccagcatgaaggggattagctgcttgccaaaggaccccatccaggtgtaggtttccacatcgtaggtgagaaagagcctttctgtgcgaggatgagagccaatcgggaagaactggatctcctgccaccagttggaggaatggctgttgatgtgatggaagtagaactccctgcgacgcgccgagcattcatgcttgtgcttgtacagacggccgcagtagtcgcagcgttgcacgggttgtatctcgtgaatgagttgtacctggcttcccttgacgagaaatttcagtgggaagccgaggcctggcgattgtatctcgtgctttactatgttgtctgcatcggcctgttcatcttctgtctcgatggtggtcatgctgacgagccctcgcgggaggcaagtccagacctcggcgcggcaggggcggagctcgaggacgagagcgcgcaggctggagctgtccagggtcctgagacgctgcggactcaggttagtaggcagtgtcaggagattaacttgcatgatcttttggagggcgtgcgggaggttcagatagtacttgatctcaacgggtccgttggtggagatgtcgatggcttgcagggttccgtgtcccttgggcgctaccaccgtgcccttgtttttcattttggacggcggtggctctgttgcttcttgcatgtttagaagcggtgtcgagggcgcgcaccgggcggcaggggcggctcgggacccggcggcatggctggcagtggtacgtcggcgccgcgcgcgggtaggttctggtactgcgccctgagaagactcgcatgcgcgacgacgcggcggttgacatcctggatctgacgcctctgggtgaaagctaccggccccgtgagcttgaacctgaaagagagttcaacagaatcaatctcggtatcgttgacggcggcttgcctaaggatttcttgcacgtcaccagagttgtcctggtaggcgatctccgccatgaactgctcgatctcttcctcttgaagatctccgcggcccgctctctcgacggtggccgcgaggtcgttggagatgcgcccaatgagttgagagaatgcattcatgcccgcctcgttccagacgcggctgtagaccacggcccccacgggatctctcgcgcgcatgaccacctgggcgaggttgagctccacgtggcgggtgaagaccgcatagttgcataggcgctggaaaaggtagttgagtgtggtggcgatgtgctcggtgacgaagaaatacatgatccatcgtctcagcggcatctcgctgacatcgcccagagcttccaagcgctccatggcctcgtagaagtccacggcaaaattaaaaaactgggagtttcgcgcggacacggtcaactcctcttccagaagacggataagttcggcgatggtggtgcgcacctcgcgctcgaaagcccctgggatttcttcctcaatctcttcttcttccactaacatctcttcctcttcaggtggggctgcaggaggagggggaacgcggcgacgccggcggcgcacgggcagacggtcgatgaatctttcaatgacctctccgcggcggcggcgcatggtttcagtgacggcgcggccgttctcgcgcggtcgcagagtaaaaacaccgccgcgcatctccttaaagtggtgactgggaggttctccgtttgggagggagagggcgctgattatacattttattaattggcccgtagggactgcacgcagagatctgatcgtgtcaagatccacgggatctgaaaacctttcgacgaaagcgtctaaccagtcacagtcacaaggtaggctgagtacggcttcttgtgggcgggggtggttatgtgttcggtctgggtcttctgtttcttcttcatctcgggaaggtgagacgatgctgctggtgatgaaattaaagtaggcagttctaagacggcggatggtggcgaggagcaccaggtctttgggtccggcttgctggatacgcaggcgattggccattccccaagcattatcctgacatctagcaagatctttgtagtagtcttgcatgagccgttctacgggcacttcttcctcacccgttctgccatgcatacgtgtgagtccaaatccgcgcattggttgtaccagtgccaagtcagctacgactctttcggcgaggatggcttgctgtacttgggtaagggtggcttgaaagtcatcaaaatccacaaagcggtggtaagctcctgtattaatggtgtaagcacagttggccatgactgaccagttaactgtctggtgaccagggcgcacgagctcggtgtatttaaggcgcgaataggcgcgggtgtcaaagatgtaatcgttgcaggtgcgcaccagatactggtaccctataagaaaatgcggcggtggttggcggtagagaggccatcgttctgtagctggagcgccaggggcgaggtcttccaacataaggcggtgatagccgtagatgtacctggacatccaggtgattcctgcggcggtagtagaagcccgaggaaactcgcgtacgcggttccaaatgttgcgtagcggcatgaagtagttcattgtaggcacggtttgaccagtgaggcgcgcgcagtcattgatgctctatagacacggagaaaatgaaagcgttcagcgactcgactccgtagcctggaggaacgtgaacgggttgggtcgcggtgtaccccggttcgagacttgtactcgagccggccggagccgcggctaacgtggtattggcactcccgtctcgacccagcctacaaaaatccaggatacggaatcgagtcgttttgctggtttccgaatggcagggaagtgagtcctattttttttttttgccgctcagatgcatcccgtgctgcgacagatgcgcccccaacaacagcccccctcgcagcagcagcagcagcaatcacaaaaggctgtccctgcaactactgcaactgccgccgtgagcggtgcgggacagcccgcctatgatctggacttggaagagggcgaaggactggcacgtctaggtgcgccttcacccgagcggcatccgcgagttcaactgaaaaaagattctcgcgaggcgtatgtgccccaacagaacctatttagagacagaagcggcgaggagccggaggagatgcgagcttcccgctttaacgcgggtcgtgagctgcgtcacggtttggaccgaagacgagtgttgcgggacgaggatttcgaagttgatgaaatgacagggatcagtcctgccagggcacacgtggctgcagccaaccttgtatcggcttacgagcagacagtaaaggaagagcgtaacttccaaaagtcttttaataatcatgtgcgaaccctgattgcccgcgaagaagttacccttggtttgatgcatttgtgggatttgatggaagctatcattcagaaccctactagcaaacctctgaccgcccagctgtttctggtggtgcaacacagcagagacaatgaggctttcagagaggcgctgctgaacatcaccgaacccgaggggagatggttgtatgatcttatcaacattctacagagtatcatagtgcaggagcggagcctgggcctggccgagaaggtggctgccatcaattactcggttttgagcttgggaaaatattacgctcgcaaaatctacaagactccatacgttcccatagacaaggaggtgaagatagatgggttctacatgcgcatgacgctcaaggtcttgaccctgagcgatgatcttggggtgtatcgcaatgacagaatgcatcgcgcggttagcgccagcaggaggcgcgagttaagcgacagggaactgatgcacagtttgcaaagagctctgactggagctggaaccgagggtgagaattacttcgacatgggagctgacttgcagtggcagcctagtcgcagggctctgagcgccgcgacggcaggatgtgagcttccttacatagaagaggcggatgaaggcgaggaggaagagggcgagtacttggaagactgatggcacaacccgtgttttttgctagatggaacagcaagcaccggatcccgcaatgcgggcggcgctgcagagccagccgtccggcattaactcctcggacgattggacccaggccatgcaacgtatcatggcgttgacgactcgcaaccccgaagcctttagacagcaaccccaggccaaccgtctatcggccatcatggaagctgtagtgccttcccgctctaatcccactcatgagaaggtcctggccatcgtgaacgcgttggtggagaacaaagctattcgtccagatgaggccggactggtatacaacgctctcttagaacgcgtggctcgctacaacagtagcaatgtgcaaaccaatttggaccgtatgataacagatgtacgcgaagccgtgtctcagcgcgaaaggttccagcgtgatgccaacctgggttcgctggtggcgttaaatgctttcttgagtactcagcctgctaatgtgccgcgtggtcaacaggattatactaactttttaagtgctttgagactgatggtatcagaagtacctcagagcgaagtgtatcagtccggtcctgattacttctttcagactagcagacagggcttgcagacggtaaatctgagccaagcttttaaaaaccttaaaggtttgtggggagtgcatgccccggtaggagaaagagcaaccgtgtctagcttgttaactccgaactcccgcctattattactgttggtagctcctttcaccgacagcggtagcatcgaccgtaattcctatttgggttacctactaaacctgtatcgcgaagccatagggcaaagtcaggtggacgagcagacctatcaagaaattacccaagtcagtcgcgctttgggacaggaagacactggcagtttggaagccactctgaacttcttgcttaccaatcggtctcaaaagatccctcctcaatatgctcttactgcggaggaggagaggatccttagatatgtgcagcagagcgtgggattgtttctgatgcaagagggggcaactccgactgcagcactggacatgacagcgcgaaatatggagcccagcatgtatgccagtaaccgacctttcattaacaaactgctggactacttgcacagagctgccgctatgaactctgattatttcaccaatgccatcttaaacccgcactggctgcccccacctggtttctacacgggcgaatatgacatgcccgaccctaatgacggatttctgtgggacgacgtggacagcgatgttttttcacctctttctgatcatcgcacgtggaaaaaggaaggcggcgatagaatgcattcttctgcatcgctgtccggggtcatgggtgctaccgcggctgagcccgagtctgcaagtccttttcctagtctacccttttctctacacagtgtacgtagcagcgaagtgggtagaataagtcgcccgagtttaatgggcgaagaggagtatctaaacgattccttgctcagaccggcaagagaaaaaaatttcccaaacaatggaatagaaagtttggtggataaaatgagtagatggaagacttatgctcaggatcacagagacgagcctgggatcatggggattacaagtagagcgagccgtagacgccagcgccatgacagacagaggggtcttgtgtgggacgatgaggattcggccgatgatagcagcgtgctggacttgggtgggagaggaaggggcaacccgtttgctcatttgcgccctcgcttgggtggtatgttgtaaaaaaaaataaaaaaaaaactcaccaaggccatggcgacgagcgtacgttcgttcttctttattatctgtgtctagtataatgaggcgagtcgtgctaggcggagcggtggtgtatccggagggtcctcctccttcgtacgagagcgtgatgcagcagcagcaggcgacggcggtgatgcaatccccactggaggctccctttgtgcctccgcgatacctggcacctacggagggcagaaacagcattcgttattcggaactggcacctcagtacgataccaccaggttgtatctggtggacaacaagtcggcggacattgcttctctgaactatcagaatgaccacagcaacttcttgaccacggtggtgcaaaacaatgactttacccctacggaagccagcacccagaccattaactttgatgaacgatcgcggtggggcggtcagctaaagaccatcatgcatactaacatgccaaacgtgaacgagtatatgtttagtaacaagttcaaagcgcgtgtgatggtgtccagaaaacctcccgacggtgctgcagttggggatacttatgatcacaagcaggatattttgaaatatgagtggttcgagtttactttgccagaaggcaacttttcagttactatgactattgatttgatgaacaatgccatcatagataattacttgaaagtgggtagacagaatggagtgcttgaaagtgacattggtgttaagttcgacaccaggaacttcaagctgggatgggatcccgaaaccaagttgatcatgcctggagtgtatacgtatgaagccttccatcctgacattgtcttactgcctggctgcggagtggattttaccgagagtcgtttgagcaaccttcttggtatcagaaaaaaacagccatttcaagagggttttaagattttgtatgaagatttagaaggtggtaatattccggccctcttggatgtagatgcctatgagaacagtaagaaagaacaaaaagccaaaatagaagctgctacagctgctgcagaagctaaggcaaacatagttgccagcgactctacaagggttgctaacgctggagaggtcagaggagacaattttgcgccaacacctgttccgactgcagaatcattattggccgatgtgtctgaaggaacggacgtgaaactcactattcaacctgtagaaaaagatagtaagaatagaagctataatgtgttggaagacaaaatcaacacagcctatcgcagttggtatctttcgtacaattatggcgatcccgaaaaaggagtgcgttcctggacattgctcaccacctcagatgtcacctgcggagcagagcaggtctactggtcgcttccagacatgatgaaggatcctgtcactttccgctccactagacaagtcagtaactaccctgtggtgggtgcagagcttatgcccgtcttctcaaagagcttctacaacgaacaagctgtgtactcccagcagctccgccagtccacctcgcttacgcacgtcttcaaccgctttcctgagaaccagattttaatccgtccgccggcgcccaccattaccaccgtcagtgaaaacgttcctgctctcacagatcacgggaccctgccgttgcgcagcagtatccggggagtccaacgtgtgaccgttactgacgccagacgccgcacctgtccctacgtgtacaaggcactgggcatagtcgcaccgcgcgtcctttcaagccgcactttctaaaaaaaaaaaaaatgtccattcttatctcgcccagtaataacaccggttggggtctgcgcgctccaagcaagatgtacggaggcgcacgcaaacgttctacccaacatcctgtccgtgttcgcggacattttcgcgctccatggggcgccctcaagggccgcactcgcgttcgaaccaccgtcgatgatgtaatcgatcaggtggttgccgacgcccgtaattatactcctactgcgcctacatctactgtggatgcagttattgacagtgtagtggctgacgctcgcaactatgctcgacgtaagagccggcgaaggcgcattgccagacgccaccgagctaccactgccatgcgagccgcaagagctctgctacgaagagctagacgcgtggggcgaagagccatgcttagggcggccagacgtgcagcttcgggcgccagcgccggcaggtcccgcaggcaagcagccgctgtcgcagcggcgactattgccgacatggcccaatcgcgaagaggcaatgtatactgggtgcgtgacgctgccaccggtcaacgtgtacccgtgcgcacccgtccccctcgcacttagaagatactgagcagtctccgatgttgtgtcccagcggcgaggatgtccaagcgcaaatacaaggaagaaatgctgcaggttatcgcacctgaagtctacggccaaccgttgaaggatgaaaaaaaaccccgcaaaatcaagcgggttaaaaaggacaaaaaagaagaggaagatggcgatgatgggctggcggagtttgtgcgcgagtttgccccacggcgacgcgtgcaatggcgtgggcgcaaagttcgacatgtgttgagacctggaacttcggtggtctttacacccggcgagcgttcaagcgctacttttaagcgttcctatgatgaggtgtacggggatgatgatattcttgagcaggcggctgaccgattaggcgagtttgcttatggcaagcgtagtagaataacttccaaggatgagacagtgtcgatacccttggatcatggaaatcccacccctagtcttaaaccggtcactttgcagcaagtgttacccgtaactccgcgaacaggtgttaaacgcgaaggtgaagatttgtatcccactatgcaactgatggtacccaaacgccagaagttggaggacgttttggagaaagtaaaagtggatccagatattcaacctgaggttaaagtgagacccattaagcaggtagcgcctggtctgggggtacaaactgtagacattaagattcccactgaaagtatggaagtgcaaactgaacccgcaaagcctactgccacctccactgaagtgcaaacggatccatggatgcccatgcctattacaactgacgccgccggtcccactcgaagatcccgacgaaagtacggtccagcaagtctgttgatgcccaattatgttgtacacccatctattattcctactcctggttaccgaggcactcgctactatcgcagccgaaacagtacctcccgccgtcgccgcaagacacctgcaaatcgcagtcgtcgccgtagacgcacaagcaaaccgactcccggcgccctggtgcggcaagtgtaccgcaatggtagtgcggaacctttgacactgccgcgtgcgcgttaccatccgagtatcatcacttaatcaatgttgccgctgcctccttgcagatatggccctcacttgtcgccttcgcgttcccatcactggttaccgaggaagaaactcgcgccgtagaagagggatgttgggacgcggaatgcgacgctacaggcgacggcgtgctatccgcaagcaattgcggggtggttttttaccagccttaattccaattatcgctgctgcaattggcgcgataccaggcatagcttccgtggcggttcaggcctcgcaacgacattgacattggaaaaaaacgtataaataaaaaaaaaaaaatacaatggactctgacactcctggtcctgtgactatgttttcttagagatggaagacatcaatttttcatccttggctccgcgacacggcacgaagccgtacatgggcacctggagcgacatcggcacgagccaactgaacgggggcgccttcaattggagcagtatctggagcgggcttaaaaattttggctcaaccataaaaacatacgggaacaaagcttggaacagcagtacaggacaggcgcttagaaataaacttaaagaccagaacttccaacaaaaagtagtcgatgggatagcttccggcatcaatggagtggtagatttggctaaccaggctgtgcagaaaaagataaacagtcgtttggacccgccgccagcaaccccaggtgaaatgcaagtggaggaagaaattcctccgccagaaaaacgaggcgacaagcgtccgcgtcccgatttggaagagacgctggtgacgcgcgtagatgaaccgccttcttatgaggaagcaacgaagcttggaatgcccaccactagaccgatagccccaatggccaccggggtgatgaaaccttctcagttgcatcgacccgtcaccttggatttgccccctccccctgctgctactgctgtacccgcttctaagcctgtcgctgccccgaaaccagtcgccgtagccaggtcacgtcccgggggcgctcctcgtccaaatgcgcactggcaaaatactctgaacagcatcgtgggtctaggcgtgcaaagtgtaaaacgccgtcgctgcttttaattaaatatggagtagcgcttaacttgcctatctgtgtatatgtgtcattacacgccgtcacagcagcagaggaaaaaaggaagaggtcgtgcgtcgacgctgagttactttcaagatggccaccccatcgatgctgccccaatgggcatacatgcacatcgccggacaggatgcttcggagtacctgagtccgggtctggtgcagttcgcccgcgccacagacacctacttcaatctgggaaataagtttagaaatcccaccgtagcgccgacccacgatgtgaccaccgaccgtagccagcggctcatgttgcgcttcgtgcccgttgaccgggaggacaatacatactcttacaaagtgcggtacaccctggccgtgggcgacaacagagtgctggatatggccagcacgttctttgacattaggggtgtgttggacagaggtcccagtttcaaaccctattctggtacggcttacaactccctggctcctaaaggcgctccaaatacatctcagtggattgcagaaggtgtaaaaaatacaactggtgaggaacacgtaacagaagaggaaaccaatactactacttacacttttggcaatgctcctgtaaaagctgaagctgaaattacaaaagaaggactcccagtaggtttggaagtttcagatgaagaaagtaaaccgatttatgctgataaaacatatcagccagaacctcagctgggagatgaaacttggactgaccttgatggaaaaaccgaaaagtatggaggcagggctctcaaacccgatactaagatgaaaccatgctacgggtcctttgccaaacctactaatgtgaaaggcggtcaggcaaaacaaaaaacaacggagcagccaaatcagaaagtcgaatatgatatcgacatggagttttttgatgcggcatcgcagaaaacaaacttaagtcctaaaattgtcatgtatgcagaaaatgtaaatttggaaactccagacactcatgtagtgtacaaacctggaacagaagacacaagttccgaagctaatttgggacaacaatctatgcccaacagacccaactacattggcttcagagataactttattggacttatgtactataacagtactggtaacatgggggtgctggctggtcaagcgtctcagttaaatgcagtggttgacttgcaggacagaaacacagaactttcttaccaactcttgcttgactctctgggcgacagaaccagatactttagcatgtggaatcaggctgtggacagttatgatcctgatgtacgtgttattgaaaatcatggtgtggaagatgaacttcccaactactgttttccactggacggcataggtgttccaacaaccagttacaaatcaatagttccaaatggagacaatgcgcctaattggaaggaacctgaagtaaatggaacaagtgagatcggacagggtaatttgtttgccatggaaattaaccttcaagccaatctatggcgaagtttcctttattccaatgtggctctatatctcccagactcgtacaaatacaccccgtccaatgtcactcttccagaaaacaaaaacacctacgactacatgaacgggcgggtggtgccgccatctctagtagacacctatgtgaacattggtgccaggtggtctctggatgccatggacaatgtcaacccattcaaccaccaccgtaacgctggcttgcgttaccgatccatgcttctgggtaacggacgttatgtgcctttccacatacaagtgcctcaaaaattcttcgctgttaaaaacctgctgcttctcccaggctcctacacttatgagtggaactttaggaaggatgtgaacatggttctacagagttccctcggtaacgacctgcgggtagatggcgccagcatcagtttcacgagcatcaacctctatgctacttttttccccatggctcacaacaccgcttccacccttgaagccatgctgcggaatgacaccaatgatcagtcattcaacgactacctatctgcagctaacatgctctaccccattcctgccaatgcaaccaatattcccatttccattccttctcgcaactgggcggctttcagaggctggtcatttaccagactgaaaaccaaagaaactccctctttggggtctggatttgacccctactttgtctattctggttctattccctacctggatggtaccttctacctgaaccacacttttaagaaggtttccatcatgtttgactcttcagtgagctggcctggaaatgacaggttactatctcctaacgaatttgaaataaagcgcactgtggatggcgaaggctacaacgtagcccaatgcaacatgaccaaagactggttcttggtacagatgctcgccaactacaacatcggctatcagggcttctacattccagaaggatacaaagatcgcatgtattcatttttcagaaacttccagcccatgagcaggcaggtggttgatgaggtcaattacaaagacttcaaggccgtcgccataccctaccaacacaacaactctggctttgtgggttacatggctccgaccatgcgccaaggtcaaccctatcccgctaactatccctatccactcattggaacaactgccgtaaatagtgttacgcagaaaaagttcttgtgtgacagaaccatgtggcgcataccgttctcgagcaacttcatgtctatgggggcccttacagacttgggacagaatatgctctatgccaactcagctcatgctctggacatgacctttgaggtggatcccatggatgagcccaccctgctttatcttctcttcgaagttttcgacgtggtcagagtgcatcagccacaccgcggcatcatcgaggcagtctacctgcgtacaccgttctcggccggtaacgctaccacgtaagaagcttcttgcttcttgcaaatagcagctgcaaccatggcctgcggatcccaaaacggctccagcgagcaagagctcagagccattgtccaagacctgggttgcggaccctattttttgggaacctacgataagcgcttcccggggttcatggcccccgataagctcgcctgtgccattgtaaatacggccggacgtgagacggggggagagcactggttggctttcggttggaacccacgttctaacacctgctacctttttgatccttttggattctcggatgatcgtctcaaacagatttaccagtttgaatatgagggtctcctgcgccgcagcgctcttgctaccaaggaccgctgtattacgctggaaaaatctacccagaccgtgcagggtccccgttctgccgcctgcggacttttctgctgcatgttccttcacgcctttgtgcactggcctgaccgtcccatggacggaaaccccaccatgaaattgctaactggagtgccaaacaacatgcttcattctcctaaagtccagcccaccctgtgtgacaatcaaaaagcactctaccattttcttaatacccattcgccttattttcgctcccatcgtacacacatcgaaagggccactgcgttcgaccgtatggatgttcaataatgactcatgtaaacaacgtgttcaataaacatcactttatttttttacatgtatcaaggctctgcattacttatttatttacaagtcgaatgggttctgacgagaatcagaatgacccgcaggcagtgatacgttgcggaactgatacttgggttgccacttgaattcgggaatcaccaacttgggaaccggtatatcgggcaggatgtcactccacagctttctggtcagctgcaaagctccaagcaggtcaggagccgaaatcttgaaatcacaattaggaccagtgctttgagcgcgagagttgcggtacaccggattgcagcactgaaacaccatcagcgacggatgtctcacgcttgccagcacggtgggatctgcaatcatgcccacatccagatcttcagcattggcaatgctgaacggggtcatcttgcaggtctgcctacccatggcgggcacccaattaggcttgtggttgcaatcgcagtgcagggggatcagtatcatcttggcctgatcctgtctgattcctggatacacggctctcatgaaagcatcatattgcttgaaagcctgctgggctttactaccctcggtataaaacatcccgcaggacctgctcgaaaactggttagctgcacagccggcatcattcacacagcagcgggcgtcattgttagctatttgcaccacacttctgccccagcggttttgggtgattttggttcgctcgggattctcctttaaggctcgttgtccgttctcgctggccacatccatctcgataatctgctccttctgaatcataatattgccatgcaggcacttcagcttgccctcataatcattgcagccatgaggccacaacgcacagcctgtacattcccaattatggtgggcgatctgagaaaaagaatgtatcattccctgcagaaatcttcccatcatcgtgctcagtgtcttgtgactagtgaaagttaactggatgcctcggtgctcctcgtttacgtactggtgacagatgcgcttgtattgttcgtgttgctcaggcattagtttaaaagaggttctaagttcgttatccagcctgtacttctccatcagcagacacatcacttccatgcctttctcccaagcagacaccaggggcaagctaatcggattcttaacagtgcaggcagcagctcctttagccagagggtcatctttagcgatcttctcaatgcttcttttgccatccttctcaacgatgcgcacgggcgggtagctgaaacccactgctacaagttgcgcctcttctctttcttcttcgctgtcttgactgatgtcttgcatggggatatgtttggtcttccttggcttctttttggggggtatcggaggaggaggactgtcgctccgttccggagacagggaggattgtgacgtttcgctcaccattaccaactgactgtcggtagaagaacctgaccccacacggcgacaggtgtttctcttcgggggcagaggtggaggcgattgcgaagggctgcggtccgacctggaaggcggatgactggcagaaccccttccgcgttcgggggtgtgctccctgtggcggtcgcttaactgatttccttcgcggctggccattgtgttctcctaggcagagaaacaacagacatggaaactcagccattgctgtcaacatcgccacgagtgccatcacatctcgtcctcagcgacgaggaaaaggagcagagcttaagcattccaccgcccagtcctgccaccacctctaccctagaagataaggaggtcgacgcatctcatgacatgcagaataaaaaagcgaaagagtctgagacagacatcgagcaagacccgggctatgtgacaccggtggaacacgaggaagagttgaaacgctttctagagagagaggatgaaaactgcccaaaacaacgagcagataactatcaccaagatgctggaaatagggatcagaacaccgactacctcatagggcttgacggggaagacgcgctccttaaacatctagcaagacagtcgctcatagtcaaggatgcattattggacagaactgaagtgcccatcagtgtggaagagctcagccgcgcctacgagcttaacctcttttcacctcgtactccccccaaacgtcagccaaacggcacctgcgagccaaatcctcgcttaaacttttatccagcttttgctgtgccagaagtactggctacctatcacatcttttttaaaaatcaaaaaattccagtctcctgccgcgctaatcgcacccgcgccgatgccctactcaatctgggacctggttcacgcttacctgatatagcttccttggaagaggttccaaagatcttcgagggtctgggcaataatgagactcgggccgcaaatgctctgcaaaagggagaaaatggcatggatgagcatcacagcgttctggtggaattggaaggcgataatgccagactcgcagtactcaagcgaagcatcgaggtcacacacttcgcatatcccgctgtcaacctgccccctaaagtcatgacggcggtcatggaccagttactcattaagcgcgcaagtcccctttcagaagacatgcatgacccagatgcctgtgatgagggtaaaccagtggtcagtgatgagcagctaacccgatggctgggcaccgactctcccagggatttggaagagcgtcgcaagcttatgatggccgtggtgctggttaccgtagaactagagtgtctccgacgtttctttaccgattcagaaaccttgcgcaaactcgaagagaatctgcactacacttttagacacggctttgtgcggcaggcatgcaagatatctaacgtggaactcaccaacctggtttcctacatgggtattctgcatgagaatcgcctaggacaaagcgtgctgcacagcaccctgaagggggaagcccgccgtgattacatccgcgattgtgtctatctgtacctgtgccacacgtggcaaaccggcatgggtgtatggcagcaatgtttagaagaacagaacttgaaagagcttgacaagctcttacagaaatctcttaaggttctgtggacagggttcgacgagcgcaccgtcgcttccgacctggcagacctcatcttcccagagcgtctcagggttactttgcgaaacggattgcctgactttatgagccagagcatgcttaacaattttcgctctttcatcctggaacgctccggtatcctgcccgccacctgctgcgcactgccctccgactttgtgcctctcacctaccgcgagtgccccccgccgctatggagtcactgctacctgttccgtctggccaactatctctcctaccactcggatgtgatcgaggatgtgagcggagacggcttgctggagtgtcactgccgctgcaatctgtgcacgccccaccggtccctagcttgcaacccccagttgatgagcgaaacccagataataggcacctttgaattgcaaggccccagcagccaaggcgatgggtcttctcctgggcaaagtttaaaactgaccccgggactgtggacctccgcctacttgcgcaagtttgctccggaagattaccacccctatgaaatcaagttctatgaggaccaatcacagcctccaaaggccgaactttcggcctgcgtcatcacccagggggcaattctggcccaattgcaagccatccaaaaatcccgccaagaatttctactgaaaaagggtaagggggtctaccttgacccccagaccggcgaggaactcaacacaaggttccctcaggatgtcccaacgacgagaaaacaagaagttgaaggtgcagccgccgcccccagaagatatggaggaagattgggacagtcaggcagaggaggcggaggaggacagtctggaggacagtctggaggaagacagtttggaggaggaaaacgaggaggcagaggaggtggaagaagtaaccgccgacaaacagttatcctcggctgcggagacaagcaacagcgctaccatctccgctccgagtcgaggaacccggcggcgtcccagcagtagatgggacgagaccggacgcttcccgaacccaaccagcgcttccaagaccggtaagaaggatcggcagggatacaagtcctggcgggggcataagaatgccatcatctcctgcttgcatgagtgcgggggcaacatatccttcacgcggcgctacttgctattccaccatggggtgaactttccgcgcaatgttttgcattactaccgtcacctccacagcccctactatagccagcaaatcccggcagtctcgacagataaagacagcggcggcgacctccaacagaaaaccagcagcggcagttagaaaatacacaacaagtgcagcaacaggaggattaaagattacagccaacgagccagcgcaaacccgagagttaagaaatcggatctttccaaccctgtatgccatcttccagcagagtcggggtcaagagcaggaactgaaaataaaaaaccgatctctgcgttcgctcaccagaagttgtttgtatcacaagagcgaagatcaacttcagcgcactctcgaggacgccgaggctctcttcaacaagtactgcgcgctgactcttaaagagtaggcagcgaccgcgcttattcaaaaaaggcgggaattacatcatcctcgacatgagtaaagaaattcccacgccttacatgtggagttatcaaccccaaatgggattggcggcaggcgcctcccaggactactccacccgcatgaattggctcagcgccgggccttctatgatttctcgagttaatgatatacgcgcctaccgaaaccaaatacttttggaacagtcagctcttaccaccacgccccgccaacaccttaatcccagaaattggcccgccgccctagtgtaccaggaaagtcccgctcccaccactgtattacttcctcgagacgcccaggccgaagtccaaatgactaatgcaggtgcgcagttagctggcggctccaccctatgtcgtcacaggcctcggcataatataaaacgcctgatgatcagaggccgaggtatccagctcaacgacgagtcggtgagctctccgcttggtctacgaccagacggaatctttcagattgccggctgcgggagatcttccttcacccctcgtcaggctgttctgactttggaaagttcgtcttcgcaaccccgctcgggcggaatcgggaccgttcaatttgtggaggagtttactccctctgtctacttcaaccccttctccggatctcctgggcattacccggacgagttcataccgaacttcgacgcgattagcgagtcagtggacggctacgattgatgtctggtgacgcggctgagctatctcggctgcgacatctagaccactgccgccgctttcgctgctttgcccgggaactcattgagttcatctacttcgaactccccaaggatcaccctcaaggtccggcccacggagtgcggatttctatcgaaggcaaaatagactctcgcctgcaacgaattttctcccagcggcccgtgctgatcgagcgagaccagggaaacaccacggtttccatctactgcatttgtaatcaccccggattgcatgaaagcctttgctgtcttatgtgtactgagtttaataaaaactgaattaagactctcctacggactgccgcttcttcaacccggattttacaaccagaagaacgaaacttttcctgtcgtccaggactctgttaacttcacctttcctactcacaaactagaagctcaacgactacaccgcttttccagaagcattttccctactaatactactttcaaaaccggaggtgagctccaaggtcttcctacagaaaacccttgggtggaagcgggccttgtagtgctaggaattcttgcgggtgggcttgtgattattctttgctacctatacacaccttgcttcactttcttagtggtgttgtggtattggtttaaaaaatggggcccatactagtcttgcttgttttactttcgcttttggaaccgggttctgccaattacgatccatgtctagacttcgacccagaaaactgcacacttacttttgcacccgacacaagccgcatctgtggagttcatcgcctctcttacgaacttggcccccaacgacaaaaatttacctgcatggtgggaatcaaccccatagttatcacccagcaaagtggagatactaagggttgcattcactgctcctgcgattccatcgagtgcacctacaccctgctgaagaccctatgcggcctaagagacctgctaccaatgaattaaaaaatgattaataaaaaatcacttacttgaaatcagcaataaggtctctgttgaaattttctcccagcagcacctcacttccctcttcccaactctggtattctaaaccccgttcagcggcatactttctccatactttaaaggggatgtcaaattttagctcctctcctgtacccacaatcttcatgtctttcttcccagatgaccaagagagtccggctcagtgactccttcaaccctgtctacccctatgaagatgaaagcacctcccaacacccctttataaacccagggtttatttccccaaatggcttcacacaaagcccaaacggagttcttactttaaaatgtttaaccccactaacaaccacaggcggatctctacagctaaaagtgggagggggacttacagtggatgacaccaacggttttttgaaagaaaacataagtgccaccacaccactcgttaagactggtcactctataggtttaccactaggagccggattgggaacgaatgaaaataaactttgtatcaaattaggacaaggacttacattcaattcaaacaacatttgcattgatgacaatattaacaccttatggacaggagtcaaccccaccgaagccaactgtcaaatcatgaactccagtgaatctaatgattgcaaattaattctaacactagttaaaactggagcactagtcactgcatttgtttatgttataggagtatctaacaattttaatatgctaactacacacagaaatataaattttactgcagagctgtttttcgattctactggtaatttactaactagactctcatccctcaaaactccacttaatcataaatcaggacaaaacatggctactggtgccattactaatgctaaaggtttcatgcccagcacgactgcctatcctttcaatgataattctagagaaaaagaaaactacatttacggaacttgttactacacagctagtgatcgcactgcttttcccattgacatatctgtcatgcttaaccgaagagcaataaatgacgagacatcatattgtattcgtataacttggtcctggaacacaggagatgccccagaggtgcaaacctctgctacaaccctagtcacctccccatttaccttttactacatcagagaagacgactgacaaataaagtttgcgatcgccaggcccaccatgtgccatcaacagctggtcatcagctggttttcgctggtcttcctcgcgagccctctggtggccatctgggagctgaagaaggatgtgtacgtggtggagctcgactggtacccagacgctccaggagagatggtggtcctgacttgcgacaccccagaagaggacggaatcacctggaccctcgaccaatcatccgaggtgctgggaagcgggaagacgctgactatccaagtgaaggagttcggagatgccggtcagtatacttgccataagggaggagaagtgctgagccactccctgctactgctgcataagaaggaggatggaatctggagcaccgacatcctgaaggaccaaaaagaaccaaagaacaagacctttctcagatgcgaagccaagaattactcagggcgcttcacttgctggtggctgacgaccatctcgactgacctcacctttagcgtcaagtcgtcgcgggggagctccgacccgcaaggagtgacttgcggcgcggcgactctgtcagcggagagggtcagaggagacaacaaagaatacgaatactcggtggaatgccaagaggactcagcctgccctgcagcggaggagtcgctgccgatcgaggtgatggtggatgccgtgcacaaactcaagtacgaaaactacacgtcgtcattcttcatccgggatatcatcaaacctgacccccctaagaacctgcaactaaagcctctgaaaaattcgcgccaggtggaagtgtcgtgggaataccctgacacttggtcgacgccccatagctatttctcactcactttctgcgtccaggtccagggtaaaagcaagcgggaaaaaaaggatcgcgtcttcacggataaaaccagcgcaaccgtcatctgccgcaagaacgcgtccatctcagtcagggcacaagaccgctactattcatcaagctggtccgaatgggcgtcggtgccctgctcaggcggcggaggctcaggaggaggtggaagcggaggcggaggatcgcgcaatctgccggtggcaacccctgaccccggcatgttcccgtgccttcaccattcccaaaacctgctgagagctgtgtcgaacatgctccagaaggctcgccaaactctggagttctatccgtgcacttcggaggaaatcgaccacgaagacatcactaaagacaaaaccagcaccgtggaagcatgcctgccgttggagctaaccaagaacgaatcatgcctgaactcccgcgagaccagctttatcacgaatggctcgtgcctggcaagccgcaaaacttcattcatgatggccctgtgcctgtcgtcgatctacgaggatctgaaaatgtaccaggtcgagttcaagacgatgaacgcgaaactgctaatggacccaaagcggcaaattttcctggatcaaaacatgctggcggtcatcgacgagttgatgcaggctctcaacttcaacagcgaaacggtgccacaaaagagcagcctggaggaaccagatttctacaagacgaaaattaagttgtgcatcctcctgcacgcgttcaggattcgcgctgtgactatcgaccgggtcatgtcgtacctgaacgccagcggcagcggggagggccgcgggagcctgctgacctgcggggatgtcgaggagaatccgggacctaaaaaatccggagtgctctttctcctggggatcatcctactcgtcctcattggtgtgcaggggaccccggtcgtccgcaaaggacggtgctcgtgcatttccaccaatcagggcaccattcacctacaatcgctgaaggatctcaagcagttcgctccgtccccatcatgcgaaaagatcgagatcatcgccaccctgaagaatggagtccagacctgcttgaacccggactccgccgatgtcaaagagctgatcaaaaaatgggaaaagcaagtctcgcaaaagaaaaaacagaaaaatggaaagaaacaccaaaagaagaaggtcctcaaagtcagaaagagccagaggagccgccagaagaagacgacgggaagcggggtgaagcaaactctgaactttgatctgctaaagctggctggagatgtggagagcaatccggggccggcacagtccctagctctgtcacttctgattctggtgctggcattcggtatccctcgcacgcaaggctcggacggtggggctcaggactgctgtctaaagtacagccagagaaagatccctgccaaggtggtgcgcagctacagaaagcaggagccttcactgggctgctcgatccccgccatcctgtttctgccaagaaaaagaagccaagccgagctgtgcgccgatccgaaggaactgtgggtgcagcagctgatgcagcacctggataagaccccgtcaccccaaaagccggcacagggatgccggaaggatcggggagcctcgaagaccggaaagaagggaaagggaagcaagggttgcaagagaactgagcgcagccagaccccaaagggcccaggctccggacaatgcaccaactacgctctgctcaagttggccggagacgtggaatccaaccccggacccatggcgccacgacgggcgcgaggttgtagaaccttgggactgcctgccctccttctgcttttgcttttgcggccacccgccactcgagggataacctgtcctccgccaatgagtgttgaacatgcagacatctgggtgaagtcttatagtctttacagccgggagagatacatctgcaactcaggattcaagagaaaagcgggcacatcatccttgaccgagtgtgtgttgaacaaagcaactaatgtggcgcattggaccacaccctcactcaaatgtatcagagacggctccggggcaaccaacttctcactactcaaacaagctggggatgtggaagaaaaccccggccccatgccgctgctgctgctgttgcctctcctgtgggcgggagcactagcaaactgggtcaatgtcatttccgacctgaaaaaaatcgaggacctaatccagtccatgcacatcgacgctactctctacaccgaatcagacgtgcatccttcatgcaaagtgactgcgatgaaatgcttcctgctggaactccaagtgatctcgctggagagcggggatgcctcaattcacgataccgtggagaacctcatcatcctggcaaataactccttgagcagcaatgggaacgtgactgagtcgggttgcaaagagtgcgaagaactggaggaaaagaacattaaggagtttctgcaatcgtttgtccacatcgtgcagatgtttatcaacacctcctaggctagcttgactgactgagatacagcgtaccttcagctcacagacatgataagatacattgatgagtttggacaaaccacaactagaatgcagtgaaaaaaatgctttatttgtgaaatttgtgatgctattgctttatttgtaaccattataagctgcaataaacaagttaacaacaacaattgcattcattttatgtttcaggttcagggggaggtgtgggaggttttttaaagcaagtaaaacctctacaaatgtggtagtcgtcagctatcctgcaggaacttgtttatttgaaaatcaattcacaaaatccgagtagttattttgcctcccccttcccatttaacagaatacaccaatctctccccacgcacagctttaaacatttggataccattagatatagacatggttttagattccacattccaaacagtttcagagcgagccaatctggggtcagtgatagataaaaatccatcgggatagtcttttaaagcgctttcacagtccaactgctgcggatgcgactccggagtctggatcacggtcatctggaagaagaacgatgggaatcataatccgaaaacggtatcggacgattgtgtctcatcaaacccacaagcagccgctgtctgcgtcgctccgtgcgactgctgtttatgggatcagggtccacagtgtcctgaagcatgattttaatagcccttaacatcaactttctggtgcgatgcgcgcagcaacgcattctgatttcactcaaatctttgcagtaggtacaacacattattacaatattgtttaataaaccataattaaaagcgctccagccaaaactcatatctgatataatcgcccctgcatgaccatcataccaaagtttaatataaattaaatgacgttccctcaaaaacacactacccacatacatgatctcttttggcatgtgcatattaacaatctgtctgtaccatggacaacgttggttaatcatgcaacccaatataaccttccggaaccacactgccaacaccgctcccccagccatgcattgaagtgaaccctgctgattacaatgacaatgaagaacccaattctctcgaccgtgaatcacttgagaatgaaaaatatctatagtggcacaacatagacataaatgcatgcatcttctcataatttttaactcctcaggatttagaaacatatcccagggaataggaagctcttgcagaacagtaaagctggcagaacaaggaagaccacgaacacaacttacactatgcatagtcatagtatcacaatctggcaacagcgggtggtcttcagtcatagaagctcgggtttcattttcctcacaacgtggtaactgggctctggtgtaagggtgatgtctggcgcatgatgtcgagcgtgcgcgcaaccttgtcataatggagttgcttcctgacattctcgtattttgtatagcaaaacgcggccctggcagaacacactcttcttcgccttctatcctgccgcttagcgtgttccgtgtgatagttcaagtacaaccacactcttaagttggtcaaaagaatgctggcttcagttgtaatcaaaactccatcgcatctaatcgttctgaggaaatcatccaagcaatgcaactggattgtgtttcaagcaggagaggagagggaagagacggaagaaccatgttaatttttattccaaacgatctcgcagtacttcaaattgtagatcgcgcagatggcatctctcgcccccactgtgttggtgaaaaagcacagctagatcaaaagaaatgcgattttcaaggtgctcaacggtggcttccagcaaagcctccacgcgcacatccaagaacaaaagaataccaaaagaaggagcattttctaactcctcaatcatcatattacattcctgcaccattcccagataattttcagctttccagccttgaattattcgtgtcagttcttgtggtaaatccaatccacacattacaaacaggtcccggagggcgccctccaccaccattcttaaacacaccctcataatgacaaaatatcttgctcctgtgtcacctgtagcgaattgagaatggcaacatcaattgacatgcccttggctctaagttcttctttaagttctagttgtaaaaactctctcatattatcaccaaactgcttagccagaagccccccgggaacaagagcaggggacgctacagtgcagtacaagcgcagacctccccaattggctccagcaaaaacaagattggaataagcatattgggaaccgccagtaatatcatcgaagttgctggaaatataatcaggcagagtttcttgtaaaaattgaataaaagaaaaatttgccaaaaaaacattcaaaacctctgggatgcaaatgcaataggttaccgcgctgcgctccaacattgttagttttgaattagtctgcaaaaataaaaaaaaaaacaagcgtcatatcatagtagcctgacgaacagatggataaatcagtctttccatcacaagacaagccacagggtctccagctcgaccctcgtaaaacctgtcatcatgattaaacaacagcaccgaaagttcctcgcggtgaccagcatgaataattcttgatgaagcatacaatccagacatgttagcatcagttaacgagaaaaaacagccaacatagcctttgggtataattatgcttaatcgtaagtatagcaaagccacccctcgcggatacaaagtaaaaggcacaggagaataaaaaatataattatttctctgctgctgttcaggcaacgtcgcccccggtccctctaaatacacatacaaagcctcatcagccatggcttaccagacaaagtacagcgggcacacaaagcacaagctctaaagtgactctccaacctctccacaatatatatatacacaagccctaaactgacgtaatgggagtaaagtgtaaaaaatcccgccaaacccaacacacaccccgaaactgcgtcaccagggaaaagtacagtttcacttccgcaatcccaacaggcgtaacttcctctttctcacggtacgtgatatcccactaacttgcaacgtcattttcccacggtcgcaccgccccttttagccgttaaccccacagccaatcaccacacgatccacactttttaaaatcacctcatttacatattggcaccattccatctataaggtatattatatagataga

SEQ ID NO: 227 - DNA, 35500 bp, Artificial Sequence
  Genome sequence of NG-791A virus
tctatctatataatataccttatagatggaatggtgccaatatgtaaatgaggtgattttaaaaagtgtggatcgtgtggtgattggctgtggggttaacggctaaaaggggcggtgcgaccgtgggaaaatgacgttttgtgggggtggagtttttttgcaagttgtcgcgggaaatgtgacgcataaaaaggcttttttctcacggaactacttagttttcccacggtatttaacaggaaatgaggtagttttgaccggatgcaagtgaaaattgttgattttcgcgcgaaaactgaatgaggaagtgtttttctgaataatgtggtatttatggcagggtggagtatttgttcagggccaggtagactttgacccattacgtggaggtttcgattaccgtgttttttacctgaatttccgcgtaccgtgtcaaagtcttctgtttttacgtaggtgtcagctgatcgctagggtatttatacctcagggtttgtgtcaagaggccactcttgagtgccagcgagaagagttttctcctctgcgccggcagtttaataataaaaaaatgagagatttgcgatttctgcctcaggaaataatctctgctgagactggaaatgaaatattggagcttgtggtgcacgccctgatgggagacgatccggagccacctgtgcagctttttgagcctcctacgcttcaggaactgtatgatttagaggtagagggatcggaggattctaatgaggaagctgtaaatggcttttttaccgattctatgcttttagctgctaatgaagggttagaattagatccgcctttggacacttttgatactccaggggtaattgtggaaagcggtacaggtgtaagaaaattacctgatttgagttccgtggactgtgatttgcactgctatgaagacgggtttcctccgagtgatgaggaggaccatgaaaaggagcagtccatgcagactgcagcgggtgagggagtgaaggctgccaatgttggttttcagttggattgcccggagcttcctggacatggctgtaagtcttgtgaatttcacaggaaaaatactggagtaaaggaactgttatgttcgctttgttatatgagaacgcactgccactttatttacagtaagtgtgtttaagttaaaatttaaaggaatatgctgtttttcacatgtatattgagtgtgagttttgtgcttcttattataggtcctgtgtctgatgctgatgaatcaccatctcctgattctactacctcacctcctgagattcaagcacctgttcctgtggacgtgcgcaagcccattcctgtgaagcttaagcctgggaaacgtccagcagtggaaaaacttgaggacttgttacagggtggggacggacctttggacttgagtacacggaaacgtccaagacaataagtgttccatatccgtgtttacttaaggtgacgtcaatatttgtgtgacagtgcaatgtaataaaaatatgttaactgttcactggtttttattgctttttgggcggggactcaggtatataagtagaagcagacctgtgtggttagctcataggagctggctttcatccatggaggtttgggccattttggaagaccttaggaagactaggcaactgttagagaacgcttcggacggagtctccggtttttggagattctggttcgctagtgaattagctagggtagtttttaggataaaacaggactataaacaagaatttgaaaagttgttggtagattgcccaggactttttgaagctcttaatttgggccatcaggttcactttaaagaaaaagttttatcagttttagacttttcaaccccaggtagaactgctgctgctgtggcttttcttacttttatattagataaatggatcccgcagactcatttcagcaggggatacgttttggatttcatagccacagcattgtggagaacatggaaggttcgcaagatgaggacaatcttaggttactggccagtgcagcctttgggtgtagcgggaatcctgaggcatccaccggtcatgccagcggttctggaggaggaacagcaagaggacaacccgagagccggcctggaccctccagtggaggaggcggagtagctgacttgtctcctgaactgcaacgggtgcttactggatctacgtccactggacgggataggggcgttaagagggagagggcatctagtggtactgatgctagatctgagttggctttaagtttaatgagtcgcagacgtcctgaaaccatttggtggcatgaggttcagaaagagggaagggatgaagtttctgtattgcaggagaaatattcactggaacaggtgaaaacatgttggttggagcctgaggatgattgggaggtggccattaaaaattatgccaagatagctttgaggcctgataaacagtataagattactagacggattaatatccggaatgcttgttacatatctggaaatggggctgaggtggtaatagatactcaagacaaggcagttattagatgctgcatgatggatatgtggcctggggtagtcggtatggaagcagtaacttttgtaaatgttaagtttaggggagatggttataatggaatagtgtttatggccaataccaaacttatattgcatggttgtagcttttttggtttcaacaatacctgtgtagatgcctggggacaggttagtgtacggggatgtagtttctatgcgtgttggattgccacagctggcagaaccaagagtcaattgtctctgaagaaatgcatatttcaaagatgtaacctgggcattctgaatgaaggcgaagcaagggtccgccactgcgcttctacagatactggatgttttattttgattaagggaaatgccagcgtaaagcataacatgatttgcggtgcttccgatgagaggccttatcaaatgctcacttgtgctggtgggcattgtaatatgctggctactgtgcatattgtttcccatcaacgcaaaaaatggcctgtttttgatcacaatgtgatgacgaagtgtaccatgcatgcaggtgggcgtagaggaatgtttatgccttaccagtgtaacatgaatcatgtgaaagtgttgttggaaccagatgccttttccagaatgagcctaacaggaatttttgacatgaacatgcaaatctggaagatcctgaggtatgatgatacgagatcgagggtacgcgcatgcgaatgcggaggcaagcatgccaggttccagccggtgtgtgtagatgtgactgaagatctcagaccggatcatttggttattgcccgcactggagcagagttcggatccagtggagaagaaactgactaaggtgagtattgggaaaactttggggtgggattttcagatggacagattgagtaaaaatttgttttttctgtcttgcagctgtcatgagtggaaacgcttcttttaaggggggagtcttcagcccttatctgacagggcgtctcccatcctgggcaggagttcgtcagaatgttatgggatctactgtggatggaagacccgtccaacccgccaattcttcaacgctgacctatgctactttaagttcttcacctttggacgcagctgcagctgccgccgccgcttctgttgccgctaacactgtgcttggaatgggttactatggaagcatcatggctaattccacttcctctaataacccttctaccctgactcaggacaagttacttgtccttttggcccagctggaggctttgacccaacgtctgggtgaactttctcagcaggtggtcgagttgcgagtacaaactgagtctgctgtcggcacggcaaagtctaaataaaaaaatcccagaatcaatgaataaataaacaagcttgttgttgatttaaaatcaagtgtttttatttcatttttcgcgcacggtatgccctagaccaccgatctctatcattgagaactcggtggattttttccaggatcctatagaggtgggattgaatgtttagatacatgggcattaggccgtctttggggtggagatagctccattgaagggattcatgctccggggtagtgttgtaaatcacccagtcataacaaggtcgcagtgcatggtgttgcacaatatcttttagaagtaggctgattgccacagataagcccttggtgtaggtgtttacaaaccggttgagctgggatgggtgcattcggggtgaaattatgtgcattttggattggatttttaagttggcaatattgccgccaagatcccgtcttgggttcatgttatgaaggaccaccaagacggtgtatccggtacatttaggaaatttatcgtgcagcttggatggaaaagcgtggaaaaatttggagacacccttgtgtcctccaagattttccatgcactcatccatgataatagcaatggggccgtgggcagcggcgcgggcaaacacgttccgtgggtctgacacatcatagttatgttcctgagttaaatcatcataagccattttaatgaatttggggcggagagtaccagattggggtatgaatgttccttcgggccccggagcatagttcccctcacagatttgcatttcccaagctttcagttccgagggtggaatcatgtccacctggggggctatgaaaaacaccgtttctggggcgggggtgattaattgtgatgatagcaaatttctgagcaattgagatttgccacatccggtggggccataaatgattccgattacgggttgcaggtggtagtttagggaacggcaactgccgtcttctcgaagcaagggggccacctcgttcatcatttcccttacatgcatattttcccgcaccaaatccattaggaggcgctctcctcctagtgatagaagttcttgtagtgaggaaaagtttttcagcggtttcagaccgtcagccatgggcattttggagagagtttgctgcaaaagttctagtctgttccacagttcagtgatgtgttctatggcatctcgatccagcagacctcctcgtttcgcgggtttggacggctcctggaatagggtatgagacgatgggcgtccagcgctgccagggttcggtccttccagggtctcagtgttcgagtcagggttgtttccgtcacagtgaaggggtgtgcgcctgcttgggcgcttgccagggtgcgcttcagactcatcctgctggtcgaaaacttctgtcgcttggcgccctgtatgtcggccaagtagcagtttaccatgagttcgtagttgagcgcctcggctgcgtggcctttggcgcggagcttacctttggaagttttcttgcataccgggcagtataggcatttcagcgcatacaacttgggcgcaaggaaaacggattctggggagtatgcatctgcgccgcaggaggcgcaaacagtttcacattccaccagccaggttaaatccggttcattggggtcaaaaacaagttttccgccatattttttgatgcgtttcttacctttggtctccatgagttcgtgtcctcgttgagtgacaaacaggctgtccgtgtccccgtagactgattttacaggcctcttctccagtggagtgcctcggtcttcttcgtacaggaactctgaccactctgatacaaaggcgcgcgtccaggccagcacaaaggaggctatgtgggaggggtagcgatcgttgtcaaccagggggtccaccttttccaaagtatgcaaacacatgtcaccctcttcaacatccaggaatgtgattggcttgtaggtgtatttcacgtgacctggggtccccgctgggggggtataaaagggggcggttctttgctcttcctcactgtcttccggatcgctgtccaggaacgtcagctgttggggtaggtattccctctcgaaggcgggcatgacctctgcactcaggttgtcagtttctaagaacgaggaggatttgatattgacagtgccggttgagatgcctttcatgaggttttcgtccatctggtcagaaaacacaatttttttattgtcaagtttggtggcaaatgatccatacagggcgttggataaaagtttggcaatggatcgcatggtttggttcttttccttgtccgcgcgctctttggcggcgatgttgagttggacatactcgcgtgccaggcacttccattcggggaagatagttgttaattcatctggcacgattctcacttgccaccctcgattatgcaaggtaattaaatccacactggtggccacctcgcctcgaaggggttcattggtccaacagagcctacctcctttcctagaacagaaagggggaagtgggtctagcataagttcatcgggagggtctgcatccatggtaaagattcccggaagtaaatccttatcaaaatagctgatgggagtggggtcatctaaggccatttgccattctcgagctgccagtgcgcgctcatatgggttaaggggactgccccatggcatgggatgggtgagtgcagaggcatacatgccacagatgtcatagacgtagatgggatcctcaaagatgcctatgtaggttggatagcatcgcccccctctgatacttgctcgcacatagtcatatagttcatgtgatggcgctagcagccccggacccaagttggtgcgattgggtttttctgttctgtagacgatctggcgaaagatggcgtgagaattggaagagatggtgggtctttgaaaaatgttgaaatgggcatgaggtagacctacagagtctctgacaaagtgggcataagattcttgaagcttggttaccagttcggcggtgacaagtacgtctagggcgcagtagtcaagtgtttcttgaatgatgtcataacctggttggtttttcttttcccacagttcgcggttgagaaggtattcttcgcgatccttccagtactcttctagcggaaacccgtctttgtctgcacggtaagatcctagcatgtagaactgattaactgccttgtaagggcagcagcccttctctacgggtagagagtatgcttgagcagcttttcgtagcgaagcgtgagtaagggcaaaggtgtctctgaccatgactttgaggaattggtatttgaagtcgatgtcgtcacaggctccctgttcccagagttggaagtctacccgtttcttgtaggcggggttgggcaaagcgaaagtaacatcattgaagagaatcttgccggccctgggcatgaaattgcgagtgatgcgaaaaggctgtggtacttccgctcggttattgataacctgggcagctaggacgatctcgtcgaaaccgttgatgttgtgtcctacgatgtataattctatgaaacgcggcgtgcctctgacgtgaggtagcttactgagctcatcaaaggttaggtctgtggggtcagataaggcgtagtgttcgagagcccattcgtgcaggtgaggattcgctttaaggaaggaggaccagaggtccactgccagtgctgtttgtaactggtcccggtactgacgaaaatgccgtccgactgccattttttctggggtgacgcaatagaaggtttgggggtcctgccgccagcgatcccacttgagttttatggcgaggtcataggcgatgttgacgagccgctggtctccagagagtttcatgaccagcatgaaggggattagctgcttgccaaaggaccccatccaggtgtaggtttccacatcgtaggtgagaaagagcctttctgtgcgaggatgagagccaatcgggaagaactggatctcctgccaccagttggaggaatggctgttgatgtgatggaagtagaactccctgcgacgcgccgagcattcatgcttgtgcttgtacagacggccgcagtagtcgcagcgttgcacgggttgtatctcgtgaatgagttgtacctggcttcccttgacgagaaatttcagtgggaagccgaggcctggcgattgtatctcgtgctttactatgttgtctgcatcggcctgttcatcttctgtctcgatggtggtcatgctgacgagccctcgcgggaggcaagtccagacctcggcgcggcaggggcggagctcgaggacgagagcgcgcaggctggagctgtccagggtcctgagacgctgcggactcaggttagtaggcagtgtcaggagattaacttgcatgatcttttggagggcgtgcgggaggttcagatagtacttgatctcaacgggtccgttggtggagatgtcgatggcttgcagggttccgtgtcccttgggcgctaccaccgtgcccttgtttttcattttggacggcggtggctctgttgcttcttgcatgtttagaagcggtgtcgagggcgcgcaccgggcggcaggggcggctcgggacccggcggcatggctggcagtggtacgtcggcgccgcgcgcgggtaggttctggtactgcgccctgagaagactcgcatgcgcgacgacgcggcggttgacatcctggatctgacgcctctgggtgaaagctaccggccccgtgagcttgaacctgaaagagagttcaacagaatcaatctcggtatcgttgacggcggcttgcctaaggatttcttgcacgtcaccagagttgtcctggtaggcgatctccgccatgaactgctcgatctcttcctcttgaagatctccgcggcccgctctctcgacggtggccgcgaggtcgttggagatgcgcccaatgagttgagagaatgcattcatgcccgcctcgttccagacgcggctgtagaccacggcccccacgggatctctcgcgcgcatgaccacctgggcgaggttgagctccacgtggcgggtgaagaccgcatagttgcataggcgctggaaaaggtagttgagtgtggtggcgatgtgctcggtgacgaagaaatacatgatccatcgtctcagcggcatctcgctgacatcgcccagagcttccaagcgctccatggcctcgtagaagtccacggcaaaattaaaaaactgggagtttcgcgcggacacggtcaactcctcttccagaagacggataagttcggcgatggtggtgcgcacctcgcgctcgaaagcccctgggatttcttcctcaatctcttcttcttccactaacatctcttcctcttcaggtggggctgcaggaggagggggaacgcggcgacgccggcggcgcacgggcagacggtcgatgaatctttcaatgacctctccgcggcggcggcgcatggtttcagtgacggcgcggccgttctcgcgcggtcgcagagtaaaaacaccgccgcgcatctccttaaagtggtgactgggaggttctccgtttgggagggagagggcgctgattatacattttattaattggcccgtagggactgcacgcagagatctgatcgtgtcaagatccacgggatctgaaaacctttcgacgaaagcgtctaaccagtcacagtcacaaggtaggctgagtacggcttcttgtgggcgggggtggttatgtgttcggtctgggtcttctgtttcttcttcatctcgggaaggtgagacgatgctgctggtgatgaaattaaagtaggcagttctaagacggcggatggtggcgaggagcaccaggtctttgggtccggcttgctggatacgcaggcgattggccattccccaagcattatcctgacatctagcaagatctttgtagtagtcttgcatgagccgttctacgggcacttcttcctcacccgttctgccatgcatacgtgtgagtccaaatccgcgcattggttgtaccagtgccaagtcagctacgactctttcggcgaggatggcttgctgtacttgggtaagggtggcttgaaagtcatcaaaatccacaaagcggtggtaagctcctgtattaatggtgtaagcacagttggccatgactgaccagttaactgtctggtgaccagggcgcacgagctcggtgtatttaaggcgcgaataggcgcgggtgtcaaagatgtaatcgttgcaggtgcgcaccagatactggtaccctataagaaaatgcggcggtggttggcggtagagaggccatcgttctgtagctggagcgccaggggcgaggtcttccaacataaggcggtgatagccgtagatgtacctggacatccaggtgattcctgcggcggtagtagaagcccgaggaaactcgcgtacgcggttccaaatgttgcgtagcggcatgaagtagttcattgtaggcacggtttgaccagtgaggcgcgcgcagtcattgatgctctatagacacggagaaaatgaaagcgttcagcgactcgactccgtagcctggaggaacgtgaacgggttgggtcgcggtgtaccccggttcgagacttgtactcgagccggccggagccgcggctaacgtggtattggcactcccgtctcgacccagcctacaaaaatccaggatacggaatcgagtcgttttgctggtttccgaatggcagggaagtgagtcctattttttttttttgccgctcagatgcatcccgtgctgcgacagatgcgcccccaacaacagcccccctcgcagcagcagcagcagcaatcacaaaaggctgtccctgcaactactgcaactgccgccgtgagcggtgcgggacagcccgcctatgatctggacttggaagagggcgaaggactggcacgtctaggtgcgccttcacccgagcggcatccgcgagttcaactgaaaaaagattctcgcgaggcgtatgtgccccaacagaacctatttagagacagaagcggcgaggagccggaggagatgcgagcttcccgctttaacgcgggtcgtgagctgcgtcacggtttggaccgaagacgagtgttgcgggacgaggatttcgaagttgatgaaatgacagggatcagtcctgccagggcacacgtggctgcagccaaccttgtatcggcttacgagcagacagtaaaggaagagcgtaacttccaaaagtcttttaataatcatgtgcgaaccctgattgcccgcgaagaagttacccttggtttgatgcatttgtgggatttgatggaagctatcattcagaaccctactagcaaacctctgaccgcccagctgtttctggtggtgcaacacagcagagacaatgaggctttcagagaggcgctgctgaacatcaccgaacccgaggggagatggttgtatgatcttatcaacattctacagagtatcatagtgcaggagcggagcctgggcctggccgagaaggtggctgccatcaattactcggttttgagcttgggaaaatattacgctcgcaaaatctacaagactccatacgttcccatagacaaggaggtgaagatagatgggttctacatgcgcatgacgctcaaggtcttgaccctgagcgatgatcttggggtgtatcgcaatgacagaatgcatcgcgcggttagcgccagcaggaggcgcgagttaagcgacagggaactgatgcacagtttgcaaagagctctgactggagctggaaccgagggtgagaattacttcgacatgggagctgacttgcagtggcagcctagtcgcagggctctgagcgccgcgacggcaggatgtgagcttccttacatagaagaggcggatgaaggcgaggaggaagagggcgagtacttggaagactgatggcacaacccgtgttttttgctagatggaacagcaagcaccggatcccgcaatgcgggcggcgctgcagagccagccgtccggcattaactcctcggacgattggacccaggccatgcaacgtatcatggcgttgacgactcgcaaccccgaagcctttagacagcaaccccaggccaaccgtctatcggccatcatggaagctgtagtgccttcccgctctaatcccactcatgagaaggtcctggccatcgtgaacgcgttggtggagaacaaagctattcgtccagatgaggccggactggtatacaacgctctcttagaacgcgtggctcgctacaacagtagcaatgtgcaaaccaatttggaccgtatgataacagatgtacgcgaagccgtgtctcagcgcgaaaggttccagcgtgatgccaacctgggttcgctggtggcgttaaatgctttcttgagtactcagcctgctaatgtgccgcgtggtcaacaggattatactaactttttaagtgctttgagactgatggtatcagaagtacctcagagcgaagtgtatcagtccggtcctgattacttctttcagactagcagacagggcttgcagacggtaaatctgagccaagcttttaaaaaccttaaaggtttgtggggagtgcatgccccggtaggagaaagagcaaccgtgtctagcttgttaactccgaactcccgcctattattactgttggtagctcctttcaccgacagcggtagcatcgaccgtaattcctatttgggttacctactaaacctgtatcgcgaagccatagggcaaagtcaggtggacgagcagacctatcaagaaattacccaagtcagtcgcgctttgggacaggaagacactggcagtttggaagccactctgaacttcttgcttaccaatcggtctcaaaagatccctcctcaatatgctcttactgcggaggaggagaggatccttagatatgtgcagcagagcgtgggattgtttctgatgcaagagggggcaactccgactgcagcactggacatgacagcgcgaaatatggagcccagcatgtatgccagtaaccgacctttcattaacaaactgctggactacttgcacagagctgccgctatgaactctgattatttcaccaatgccatcttaaacccgcactggctgcccccacctggtttctacacgggcgaatatgacatgcccgaccctaatgacggatttctgtgggacgacgtggacagcgatgttttttcacctctttctgatcatcgcacgtggaaaaaggaaggcggcgatagaatgcattcttctgcatcgctgtccggggtcatgggtgctaccgcggctgagcccgagtctgcaagtccttttcctagtctacccttttctctacacagtgtacgtagcagcgaagtgggtagaataagtcgcccgagtttaatgggcgaagaggagtatctaaacgattccttgctcagaccggcaagagaaaaaaatttcccaaacaatggaatagaaagtttggtggataaaatgagtagatggaagacttatgctcaggatcacagagacgagcctgggatcatggggattacaagtagagcgagccgtagacgccagcgccatgacagacagaggggtcttgtgtgggacgatgaggattcggccgatgatagcagcgtgctggacttgggtgggagaggaaggggcaacccgtttgctcatttgcgccctcgcttgggtggtatgttgtaaaaaaaaataaaaaaaaaactcaccaaggccatggcgacgagcgtacgttcgttcttctttattatctgtgtctagtataatgaggcgagtcgtgctaggcggagcggtggtgtatccggagggtcctcctccttcgtacgagagcgtgatgcagcagcagcaggcgacggcggtgatgcaatccccactggaggctccctttgtgcctccgcgatacctggcacctacggagggcagaaacagcattcgttattcggaactggcacctcagtacgataccaccaggttgtatctggtggacaacaagtcggcggacattgcttctctgaactatcagaatgaccacagcaacttcttgaccacggtggtgcaaaacaatgactttacccctacggaagccagcacccagaccattaactttgatgaacgatcgcggtggggcggtcagctaaagaccatcatgcatactaacatgccaaacgtgaacgagtatatgtttagtaacaagttcaaagcgcgtgtgatggtgtccagaaaacctcccgacggtgctgcagttggggatacttatgatcacaagcaggatattttgaaatatgagtggttcgagtttactttgccagaaggcaacttttcagttactatgactattgatttgatgaacaatgccatcatagataattacttgaaagtgggtagacagaatggagtgcttgaaagtgacattggtgttaagttcgacaccaggaacttcaagctgggatgggatcccgaaaccaagttgatcatgcctggagtgtatacgtatgaagccttccatcctgacattgtcttactgcctggctgcggagtggattttaccgagagtcgtttgagcaaccttcttggtatcagaaaaaaacagccatttcaagagggttttaagattttgtatgaagatttagaaggtggtaatattccggccctcttggatgtagatgcctatgagaacagtaagaaagaacaaaaagccaaaatagaagctgctacagctgctgcagaagctaaggcaaacatagttgccagcgactctacaagggttgctaacgctggagaggtcagaggagacaattttgcgccaacacctgttccgactgcagaatcattattggccgatgtgtctgaaggaacggacgtgaaactcactattcaacctgtagaaaaagatagtaagaatagaagctataatgtgttggaagacaaaatcaacacagcctatcgcagttggtatctttcgtacaattatggcgatcccgaaaaaggagtgcgttcctggacattgctcaccacctcagatgtcacctgcggagcagagcaggtctactggtcgcttccagacatgatgaaggatcctgtcactttccgctccactagacaagtcagtaactaccctgtggtgggtgcagagcttatgcccgtcttctcaaagagcttctacaacgaacaagctgtgtactcccagcagctccgccagtccacctcgcttacgcacgtcttcaaccgctttcctgagaaccagattttaatccgtccgccggcgcccaccattaccaccgtcagtgaaaacgttcctgctctcacagatcacgggaccctgccgttgcgcagcagtatccggggagtccaacgtgtgaccgttactgacgccagacgccgcacctgtccctacgtgtacaaggcactgggcatagtcgcaccgcgcgtcctttcaagccgcactttctaaaaaaaaaaaaaatgtccattcttatctcgcccagtaataacaccggttggggtctgcgcgctccaagcaagatgtacggaggcgcacgcaaacgttctacccaacatcctgtccgtgttcgcggacattttcgcgctccatggggcgccctcaagggccgcactcgcgttcgaaccaccgtcgatgatgtaatcgatcaggtggttgccgacgcccgtaattatactcctactgcgcctacatctactgtggatgcagttattgacagtgtagtggctgacgctcgcaactatgctcgacgtaagagccggcgaaggcgcattgccagacgccaccgagctaccactgccatgcgagccgcaagagctctgctacgaagagctagacgcgtggggcgaagagccatgcttagggcggccagacgtgcagcttcgggcgccagcgccggcaggtcccgcaggcaagcagccgctgtcgcagcggcgactattgccgacatggcccaatcgcgaagaggcaatgtatactgggtgcgtgacgctgccaccggtcaacgtgtacccgtgcgcacccgtccccctcgcacttagaagatactgagcagtctccgatgttgtgtcccagcggcgaggatgtccaagcgcaaatacaaggaagaaatgctgcaggttatcgcacctgaagtctacggccaaccgttgaaggatgaaaaaaaaccccgcaaaatcaagcgggttaaaaaggacaaaaaagaagaggaagatggcgatgatgggctggcggagtttgtgcgcgagtttgccccacggcgacgcgtgcaatggcgtgggcgcaaagttcgacatgtgttgagacctggaacttcggtggtctttacacccggcgagcgttcaagcgctacttttaagcgttcctatgatgaggtgtacggggatgatgatattcttgagcaggcggctgaccgattaggcgagtttgcttatggcaagcgtagtagaataacttccaaggatgagacagtgtcgatacccttggatcatggaaatcccacccctagtcttaaaccggtcactttgcagcaagtgttacccgtaactccgcgaacaggtgttaaacgcgaaggtgaagatttgtatcccactatgcaactgatggtacccaaacgccagaagttggaggacgttttggagaaagtaaaagtggatccagatattcaacctgaggttaaagtgagacccattaagcaggtagcgcctggtctgggggtacaaactgtagacattaagattcccactgaaagtatggaagtgcaaactgaacccgcaaagcctactgccacctccactgaagtgcaaacggatccatggatgcccatgcctattacaactgacgccgccggtcccactcgaagatcccgacgaaagtacggtccagcaagtctgttgatgcccaattatgttgtacacccatctattattcctactcctggttaccgaggcactcgctactatcgcagccgaaacagtacctcccgccgtcgccgcaagacacctgcaaatcgcagtcgtcgccgtagacgcacaagcaaaccgactcccggcgccctggtgcggcaagtgtaccgcaatggtagtgcggaacctttgacactgccgcgtgcgcgttaccatccgagtatcatcacttaatcaatgttgccgctgcctccttgcagatatggccctcacttgtcgccttcgcgttcccatcactggttaccgaggaagaaactcgcgccgtagaagagggatgttgggacgcggaatgcgacgctacaggcgacggcgtgctatccgcaagcaattgcggggtggttttttaccagccttaattccaattatcgctgctgcaattggcgcgataccaggcatagcttccgtggcggttcaggcctcgcaacgacattgacattggaaaaaaacgtataaataaaaaaaaaaaaatacaatggactctgacactcctggtcctgtgactatgttttcttagagatggaagacatcaatttttcatccttggctccgcgacacggcacgaagccgtacatgggcacctggagcgacatcggcacgagccaactgaacgggggcgccttcaattggagcagtatctggagcgggcttaaaaattttggctcaaccataaaaacatacgggaacaaagcttggaacagcagtacaggacaggcgcttagaaataaacttaaagaccagaacttccaacaaaaagtagtcgatgggatagcttccggcatcaatggagtggtagatttggctaaccaggctgtgcagaaaaagataaacagtcgtttggacccgccgccagcaaccccaggtgaaatgcaagtggaggaagaaattcctccgccagaaaaacgaggcgacaagcgtccgcgtcccgatttggaagagacgctggtgacgcgcgtagatgaaccgccttcttatgaggaagcaacgaagcttggaatgcccaccactagaccgatagccccaatggccaccggggtgatgaaaccttctcagttgcatcgacccgtcaccttggatttgccccctccccctgctgctactgctgtacccgcttctaagcctgtcgctgccccgaaaccagtcgccgtagccaggtcacgtcccgggggcgctcctcgtccaaatgcgcactggcaaaatactctgaacagcatcgtgggtctaggcgtgcaaagtgtaaaacgccgtcgctgcttttaattaaatatggagtagcgcttaacttgcctatctgtgtatatgtgtcattacacgccgtcacagcagcagaggaaaaaaggaagaggtcgtgcgtcgacgctgagttactttcaagatggccaccccatcgatgctgccccaatgggcatacatgcacatcgccggacaggatgcttcggagtacctgagtccgggtctggtgcagttcgcccgcgccacagacacctacttcaatctgggaaataagtttagaaatcccaccgtagcgccgacccacgatgtgaccaccgaccgtagccagcggctcatgttgcgcttcgtgcccgttgaccgggaggacaatacatactcttacaaagtgcggtacaccctggccgtgggcgacaacagagtgctggatatggccagcacgttctttgacattaggggtgtgttggacagaggtcccagtttcaaaccctattctggtacggcttacaactccctggctcctaaaggcgctccaaatacatctcagtggattgcagaaggtgtaaaaaatacaactggtgaggaacacgtaacagaagaggaaaccaatactactacttacacttttggcaatgctcctgtaaaagctgaagctgaaattacaaaagaaggactcccagtaggtttggaagtttcagatgaagaaagtaaaccgatttatgctgataaaacatatcagccagaacctcagctgggagatgaaacttggactgaccttgatggaaaaaccgaaaagtatggaggcagggctctcaaacccgatactaagatgaaaccatgctacgggtcctttgccaaacctactaatgtgaaaggcggtcaggcaaaacaaaaaacaacggagcagccaaatcagaaagtcgaatatgatatcgacatggagttttttgatgcggcatcgcagaaaacaaacttaagtcctaaaattgtcatgtatgcagaaaatgtaaatttggaaactccagacactcatgtagtgtacaaacctggaacagaagacacaagttccgaagctaatttgggacaacaatctatgcccaacagacccaactacattggcttcagagataactttattggacttatgtactataacagtactggtaacatgggggtgctggctggtcaagcgtctcagttaaatgcagtggttgacttgcaggacagaaacacagaactttcttaccaactcttgcttgactctctgggcgacagaaccagatactttagcatgtggaatcaggctgtggacagttatgatcctgatgtacgtgttattgaaaatcatggtgtggaagatgaacttcccaactactgttttccactggacggcataggtgttccaacaaccagttacaaatcaatagttccaaatggagacaatgcgcctaattggaaggaacctgaagtaaatggaacaagtgagatcggacagggtaatttgtttgccatggaaattaaccttcaagccaatctatggcgaagtttcctttattccaatgtggctctatatctcccagactcgtacaaatacaccccgtccaatgtcactcttccagaaaacaaaaacacctacgactacatgaacgggcgggtggtgccgccatctctagtagacacctatgtgaacattggtgccaggtggtctctggatgccatggacaatgtcaacccattcaaccaccaccgtaacgctggcttgcgttaccgatccatgcttctgggtaacggacgttatgtgcctttccacatacaagtgcctcaaaaattcttcgctgttaaaaacctgctgcttctcccaggctcctacacttatgagtggaactttaggaaggatgtgaacatggttctacagagttccctcggtaacgacctgcgggtagatggcgccagcatcagtttcacgagcatcaacctctatgctacttttttccccatggctcacaacaccgcttccacccttgaagccatgctgcggaatgacaccaatgatcagtcattcaacgactacctatctgcagctaacatgctctaccccattcctgccaatgcaaccaatattcccatttccattccttctcgcaactgggcggctttcagaggctggtcatttaccagactgaaaaccaaagaaactccctctttggggtctggatttgacccctactttgtctattctggttctattccctacctggatggtaccttctacctgaaccacacttttaagaaggtttccatcatgtttgactcttcagtgagctggcctggaaatgacaggttactatctcctaacgaatttgaaataaagcgcactgtggatggcgaaggctacaacgtagcccaatgcaacatgaccaaagactggttcttggtacagatgctcgccaactacaacatcggctatcagggcttctacattccagaaggatacaaagatcgcatgtattcatttttcagaaacttccagcccatgagcaggcaggtggttgatgaggtcaattacaaagacttcaaggccgtcgccataccctaccaacacaacaactctggctttgtgggttacatggctccgaccatgcgccaaggtcaaccctatcccgctaactatccctatccactcattggaacaactgccgtaaatagtgttacgcagaaaaagttcttgtgtgacagaaccatgtggcgcataccgttctcgagcaacttcatgtctatgggggcccttacagacttgggacagaatatgctctatgccaactcagctcatgctctggacatgacctttgaggtggatcccatggatgagcccaccctgctttatcttctcttcgaagttttcgacgtggtcagagtgcatcagccacaccgcggcatcatcgaggcagtctacctgcgtacaccgttctcggccggtaacgctaccacgtaagaagcttcttgcttcttgcaaatagcagctgcaaccatggcctgcggatcccaaaacggctccagcgagcaagagctcagagccattgtccaagacctgggttgcggaccctattttttgggaacctacgataagcgcttcccggggttcatggcccccgataagctcgcctgtgccattgtaaatacggccggacgtgagacggggggagagcactggttggctttcggttggaacccacgttctaacacctgctacctttttgatccttttggattctcggatgatcgtctcaaacagatttaccagtttgaatatgagggtctcctgcgccgcagcgctcttgctaccaaggaccgctgtattacgctggaaaaatctacccagaccgtgcagggtccccgttctgccgcctgcggacttttctgctgcatgttccttcacgcctttgtgcactggcctgaccgtcccatggacggaaaccccaccatgaaattgctaactggagtgccaaacaacatgcttcattctcctaaagtccagcccaccctgtgtgacaatcaaaaagcactctaccattttcttaatacccattcgccttattttcgctcccatcgtacacacatcgaaagggccactgcgttcgaccgtatggatgttcaataatgactcatgtaaacaacgtgttcaataaacatcactttatttttttacatgtatcaaggctctgcattacttatttatttacaagtcgaatgggttctgacgagaatcagaatgacccgcaggcagtgatacgttgcggaactgatacttgggttgccacttgaattcgggaatcaccaacttgggaaccggtatatcgggcaggatgtcactccacagctttctggtcagctgcaaagctccaagcaggtcaggagccgaaatcttgaaatcacaattaggaccagtgctttgagcgcgagagttgcggtacaccggattgcagcactgaaacaccatcagcgacggatgtctcacgcttgccagcacggtgggatctgcaatcatgcccacatccagatcttcagcattggcaatgctgaacggggtcatcttgcaggtctgcctacccatggcgggcacccaattaggcttgtggttgcaatcgcagtgcagggggatcagtatcatcttggcctgatcctgtctgattcctggatacacggctctcatgaaagcatcatattgcttgaaagcctgctgggctttactaccctcggtataaaacatcccgcaggacctgctcgaaaactggttagctgcacagccggcatcattcacacagcagcgggcgtcattgttagctatttgcaccacacttctgccccagcggttttgggtgattttggttcgctcgggattctcctttaaggctcgttgtccgttctcgctggccacatccatctcgataatctgctccttctgaatcataatattgccatgcaggcacttcagcttgccctcataatcattgcagccatgaggccacaacgcacagcctgtacattcccaattatggtgggcgatctgagaaaaagaatgtatcattccctgcagaaatcttcccatcatcgtgctcagtgtcttgtgactagtgaaagttaactggatgcctcggtgctcctcgtttacgtactggtgacagatgcgcttgtattgttcgtgttgctcaggcattagtttaaaagaggttctaagttcgttatccagcctgtacttctccatcagcagacacatcacttccatgcctttctcccaagcagacaccaggggcaagctaatcggattcttaacagtgcaggcagcagctcctttagccagagggtcatctttagcgatcttctcaatgcttcttttgccatccttctcaacgatgcgcacgggcgggtagctgaaacccactgctacaagttgcgcctcttctctttcttcttcgctgtcttgactgatgtcttgcatggggatatgtttggtcttccttggcttctttttggggggtatcggaggaggaggactgtcgctccgttccggagacagggaggattgtgacgtttcgctcaccattaccaactgactgtcggtagaagaacctgaccccacacggcgacaggtgtttctcttcgggggcagaggtggaggcgattgcgaagggctgcggtccgacctggaaggcggatgactggcagaaccccttccgcgttcgggggtgtgctccctgtggcggtcgcttaactgatttccttcgcggctggccattgtgttctcctaggcagagaaacaacagacatggaaactcagccattgctgtcaacatcgccacgagtgccatcacatctcgtcctcagcgacgaggaaaaggagcagagcttaagcattccaccgcccagtcctgccaccacctctaccctagaagataaggaggtcgacgcatctcatgacatgcagaataaaaaagcgaaagagtctgagacagacatcgagcaagacccgggctatgtgacaccggtggaacacgaggaagagttgaaacgctttctagagagagaggatgaaaactgcccaaaacaacgagcagataactatcaccaagatgctggaaatagggatcagaacaccgactacctcatagggcttgacggggaagacgcgctccttaaacatctagcaagacagtcgctcatagtcaaggatgcattattggacagaactgaagtgcccatcagtgtggaagagctcagccgcgcctacgagcttaacctcttttcacctcgtactccccccaaacgtcagccaaacggcacctgcgagccaaatcctcgcttaaacttttatccagcttttgctgtgccagaagtactggctacctatcacatcttttttaaaaatcaaaaaattccagtctcctgccgcgctaatcgcacccgcgccgatgccctactcaatctgggacctggttcacgcttacctgatatagcttccttggaagaggttccaaagatcttcgagggtctgggcaataatgagactcgggccgcaaatgctctgcaaaagggagaaaatggcatggatgagcatcacagcgttctggtggaattggaaggcgataatgccagactcgcagtactcaagcgaagcatcgaggtcacacacttcgcatatcccgctgtcaacctgccccctaaagtcatgacggcggtcatggaccagttactcattaagcgcgcaagtcccctttcagaagacatgcatgacccagatgcctgtgatgagggtaaaccagtggtcagtgatgagcagctaacccgatggctgggcaccgactctcccagggatttggaagagcgtcgcaagcttatgatggccgtggtgctggttaccgtagaactagagtgtctccgacgtttctttaccgattcagaaaccttgcgcaaactcgaagagaatctgcactacacttttagacacggctttgtgcggcaggcatgcaagatatctaacgtggaactcaccaacctggtttcctacatgggtattctgcatgagaatcgcctaggacaaagcgtgctgcacagcaccctgaagggggaagcccgccgtgattacatccgcgattgtgtctatctgtacctgtgccacacgtggcaaaccggcatgggtgtatggcagcaatgtttagaagaacagaacttgaaagagcttgacaagctcttacagaaatctcttaaggttctgtggacagggttcgacgagcgcaccgtcgcttccgacctggcagacctcatcttcccagagcgtctcagggttactttgcgaaacggattgcctgactttatgagccagagcatgcttaacaattttcgctctttcatcctggaacgctccggtatcctgcccgccacctgctgcgcactgccctccgactttgtgcctctcacctaccgcgagtgccccccgccgctatggagtcactgctacctgttccgtctggccaactatctctcctaccactcggatgtgatcgaggatgtgagcggagacggcttgctggagtgtcactgccgctgcaatctgtgcacgccccaccggtccctagcttgcaacccccagttgatgagcgaaacccagataataggcacctttgaattgcaaggccccagcagccaaggcgatgggtcttctcctgggcaaagtttaaaactgaccccgggactgtggacctccgcctacttgcgcaagtttgctccggaagattaccacccctatgaaatcaagttctatgaggaccaatcacagcctccaaaggccgaactttcggcctgcgtcatcacccagggggcaattctggcccaattgcaagccatccaaaaatcccgccaagaatttctactgaaaaagggtaagggggtctaccttgacccccagaccggcgaggaactcaacacaaggttccctcaggatgtcccaacgacgagaaaacaagaagttgaaggtgcagccgccgcccccagaagatatggaggaagattgggacagtcaggcagaggaggcggaggaggacagtctggaggacagtctggaggaagacagtttggaggaggaaaacgaggaggcagaggaggtggaagaagtaaccgccgacaaacagttatcctcggctgcggagacaagcaacagcgctaccatctccgctccgagtcgaggaacccggcggcgtcccagcagtagatgggacgagaccggacgcttcccgaacccaaccagcgcttccaagaccggtaagaaggatcggcagggatacaagtcctggcgggggcataagaatgccatcatctcctgcttgcatgagtgcgggggcaacatatccttcacgcggcgctacttgctattccaccatggggtgaactttccgcgcaatgttttgcattactaccgtcacctccacagcccctactatagccagcaaatcccggcagtctcgacagataaagacagcggcggcgacctccaacagaaaaccagcagcggcagttagaaaatacacaacaagtgcagcaacaggaggattaaagattacagccaacgagccagcgcaaacccgagagttaagaaatcggatctttccaaccctgtatgccatcttccagcagagtcggggtcaagagcaggaactgaaaataaaaaaccgatctctgcgttcgctcaccagaagttgtttgtatcacaagagcgaagatcaacttcagcgcactctcgaggacgccgaggctctcttcaacaagtactgcgcgctgactcttaaagagtaggcagcgaccgcgcttattcaaaaaaggcgggaattacatcatcctcgacatgagtaaagaaattcccacgccttacatgtggagttatcaaccccaaatgggattggcggcaggcgcctcccaggactactccacccgcatgaattggctcagcgccgggccttctatgatttctcgagttaatgatatacgcgcctaccgaaaccaaatacttttggaacagtcagctcttaccaccacgccccgccaacaccttaatcccagaaattggcccgccgccctagtgtaccaggaaagtcccgctcccaccactgtattacttcctcgagacgcccaggccgaagtccaaatgactaatgcaggtgcgcagttagctggcggctccaccctatgtcgtcacaggcctcggcataatataaaacgcctgatgatcagaggccgaggtatccagctcaacgacgagtcggtgagctctccgcttggtctacgaccagacggaatctttcagattgccggctgcgggagatcttccttcacccctcgtcaggctgttctgactttggaaagttcgtcttcgcaaccccgctcgggcggaatcgggaccgttcaatttgtggaggagtttactccctctgtctacttcaaccccttctccggatctcctgggcattacccggacgagttcataccgaacttcgacgcgattagcgagtcagtggacggctacgattgatgtctggtgacgcggctgagctatctcggctgcgacatctagaccactgccgccgctttcgctgctttgcccgggaactcattgagttcatctacttcgaactccccaaggatcaccctcaaggtccggcccacggagtgcggatttctatcgaaggcaaaatagactctcgcctgcaacgaattttctcccagcggcccgtgctgatcgagcgagaccagggaaacaccacggtttccatctactgcatttgtaatcaccccggattgcatgaaagcctttgctgtcttatgtgtactgagtttaataaaaactgaattaagactctcctacggactgccgcttcttcaacccggattttacaaccagaagaacgaaacttttcctgtcgtccaggactctgttaacttcacctttcctactcacaaactagaagctcaacgactacaccgcttttccagaagcattttccctactaatactactttcaaaaccggaggtgagctccaaggtcttcctacagaaaacccttgggtggaagcgggccttgtagtgctaggaattcttgcgggtgggcttgtgattattctttgctacctatacacaccttgcttcactttcttagtggtgttgtggtattggtttaaaaaatggggcccatactagtcttgcttgttttactttcgcttttggaaccgggttctgccaattacgatccatgtctagacttcgacccagaaaactgcacacttacttttgcacccgacacaagccgcatctgtggagttcatcgcctctcttacgaacttggcccccaacgacaaaaatttacctgcatggtgggaatcaaccccatagttatcacccagcaaagtggagatactaagggttgcattcactgctcctgcgattccatcgagtgcacctacaccctgctgaagaccctatgcggcctaagagacctgctaccaatgaattaaaaaatgattaataaaaaatcacttacttgaaatcagcaataaggtctctgttgaaattttctcccagcagcacctcacttccctcttcccaactctggtattctaaaccccgttcagcggcatactttctccatactttaaaggggatgtcaaattttagctcctctcctgtacccacaatcttcatgtctttcttcccagatgaccaagagagtccggctcagtgactccttcaaccctgtctacccctatgaagatgaaagcacctcccaacacccctttataaacccagggtttatttccccaaatggcttcacacaaagcccaaacggagttcttactttaaaatgtttaaccccactaacaaccacaggcggatctctacagctaaaagtgggagggggacttacagtggatgacaccaacggttttttgaaagaaaacataagtgccaccacaccactcgttaagactggtcactctataggtttaccactaggagccggattgggaacgaatgaaaataaactttgtatcaaattaggacaaggacttacattcaattcaaacaacatttgcattgatgacaatattaacaccttatggacaggagtcaaccccaccgaagccaactgtcaaatcatgaactccagtgaatctaatgattgcaaattaattctaacactagttaaaactggagcactagtcactgcatttgtttatgttataggagtatctaacaattttaatatgctaactacacacagaaatataaattttactgcagagctgtttttcgattctactggtaatttactaactagactctcatccctcaaaactccacttaatcataaatcaggacaaaacatggctactggtgccattactaatgctaaaggtttcatgcccagcacgactgcctatcctttcaatgataattctagagaaaaagaaaactacatttacggaacttgttactacacagctagtgatcgcactgcttttcccattgacatatctgtcatgcttaaccgaagagcaataaatgacgagacatcatattgtattcgtataacttggtcctggaacacaggagatgccccagaggtgcaaacctctgctacaaccctagtcacctccccatttaccttttactacatcagagaagacgactgacaaataaagtttgcgatcgccaggcccaccatgtgccaccagcaactggtcatcagctggttttctctggtgtttctggccagccctctggtcgccatctgggaactgaagaaggacgtgtacgtggtcgagctggactggtatcccgatgctcccggcgagatggtggtgctgacatgcgatacacccgaggaagacggcatcacatggacactggaccagtcctccgaagtgctgggatccggcaagaccctcaccatccaagtgaaagagtttggcgatgctggccagtacacatgccacaaaggcggcgaagtgctctcccactctctgctgctgctccacaagaaagaggacggaatctggtccaccgacattctgaaggaccagaaagagcctaagaacaaaacatttctgaggtgcgaagccaagaactacagcggaaggttcacatgctggtggctgaccaccattagcaccgacctcaccttcagcgtcaaatcctccagaggcagctccgatcctcaaggcgtcacatgcggagccgctacactgtccgccgagagggtgaggggagacaacaaggagtatgagtacagcgtggagtgtcaagaggatagcgcttgtcccgctgctgaggaatctctgcctattgaggtgatggtggacgccgtccataagctgaagtacgaaaactacaccagctccttcttcattagagacatcatcaagcccgatccccccaagaatctgcagctcaagcctctgaagaatagcagacaagtcgaggtgagctgggagtatcccgacacatggagcacacctcacagctatttctctctgaccttctgcgtgcaagtgcaaggcaagagcaagagagagaagaaagatagagtgtttacagataagacaagcgccaccgtcatttgcagaaagaacgcctccatcagcgtgagagcccaagacagatattacagcagcagctggagcgaatgggcctccgtgccttgtagcggcggcggaggcagcggcggcggcggcagcggcggaggaggatctagaaatctgcccgtcgctacacccgaccccggaatgttcccttgtctgcaccacagccagaatctgctgagagccgtgtccaacatgctccaaaaagctagacagacactggagttctacccttgcacaagcgaggaaatcgaccacgaggacatcaccaaggataagaccagcaccgtggaagcttgtctgcctctggagctgacaaagaacgagagctgtctgaactctagagaaaccagcttcatcacaaatggcagctgtctggcctctagaaagacaagcttcatgatggccctctgtctgagcagcatctacgaggatctgaaaatgtaccaagtggagttcaagaccatgaacgccaagctcctcatggaccccaagaggcaaatttttctggatcagaatatgctcgccgtcatcgatgagctcatgcaagccctcaatttcaacagcgagaccgtgccccaaaagtcctccctcgaagagcccgacttctataagaccaaaatcaagctctgtattctgctgcacgcttttagaattagagccgtcacaatcgatagagtgatgagctacctcaacgcctccggaagcggcgagggcagaggatctctgctgacatgcggagatgtggaggaaaaccccggccctaagaagagcggcgtgctgtttctgctcggaattattctgctggtgctgatcggagtccaaggcacacccgtggtgaggaaaggcagatgcagctgcatcagcaccaaccaaggcacaatccacctccagtccctcaaggatctgaaacagtttgctccctcccctagctgcgagaagatcgagatcatcgccaccctcaagaacggcgtccagacatgtctgaatcccgactccgccgacgtcaaagagctgatcaagaagtgggagaaacaagtgagccaaaagaagaaacagaaaaacggaaagaagcatcagaagaaaaaagtgctgaaggtgaggaagagccagaggagcagacagaagaaaaccaccggatccggacaatgtaccaactacgctctgctgaagctggctggcgacgtggaatccaaccccggacccgcccctagaagggctagaggatgtagaaccctcggactccccgctctgctgctgctgctgctcctcagaccccccgctaccagaggaattacatgccctcctcccatgagcgtcgaacatgccgacatctgggtgaagagctactctctgtactctagagagaggtacatctgcaactccggctttaagaggaaggctggcaccagcagcctcacagagtgtgtgctgaacaaagctaccaacgtggcccattggaccaccccctctctgaagtgcattagggatggcagcggcgccaccaatttctctctgctgaaacaagccggagacgtggaagagaaccccggccccgactggacatggaggattctgtttctggtggccgctgctaccggcgcccattccaattgggtcaatgtgatctccgacctcaagaagatcgaggatctgatccagtccatgcacatcgatgccacactgtataccgaaagcgacgtgcaccccagctgcaaggtcaccgccatgaagtgctttctgctggaactccaagtgatctctctggagtccggcgatgcttccattcacgacacagtcgagaatctgatcattctcgccaacaacagcctctcctccaatggaaacgtgaccgagagcggctgtaaggagtgcgaggaactcgaggagaagaacatcaaggaatttctgcagtccttcgtccacatcgtccagatgttcatcaatacaagctgagctagcttgactgactgagatacagcgtaccttcagctcacagacatgataagatacattgatgagtttggacaaaccacaactagaatgcagtgaaaaaaatgctttatttgtgaaatttgtgatgctattgctttatttgtaaccattataagctgcaataaacaagttaacaacaacaattgcattcattttatgtttcaggttcagggggaggtgtgggaggttttttaaagcaagtaaaacctctacaaatgtggtagtcgtcagctatcctgcaggaacttgtttatttgaaaatcaattcacaaaatccgagtagttattttgcctcccccttcccatttaacagaatacaccaatctctccccacgcacagctttaaacatttggataccattagatatagacatggttttagattccacattccaaacagtttcagagcgagccaatctggggtcagtgatagataaaaatccatcgggatagtcttttaaagcgctttcacagtccaactgctgcggatgcgactccggagtctggatcacggtcatctggaagaagaacgatgggaatcataatccgaaaacggtatcggacgattgtgtctcatcaaacccacaagcagccgctgtctgcgtcgctccgtgcgactgctgtttatgggatcagggtccacagtgtcctgaagcatgattttaatagcccttaacatcaactttctggtgcgatgcgcgcagcaacgcattctgatttcactcaaatctttgcagtaggtacaacacattattacaatattgtttaataaaccataattaaaagcgctccagccaaaactcatatctgatataatcgcccctgcatgaccatcataccaaagtttaatataaattaaatgacgttccctcaaaaacacactacccacatacatgatctcttttggcatgtgcatattaacaatctgtctgtaccatggacaacgttggttaatcatgcaacccaatataaccttccggaaccacactgccaacaccgctcccccagccatgcattgaagtgaaccctgctgattacaatgacaatgaagaacccaattctctcgaccgtgaatcacttgagaatgaaaaatatctatagtggcacaacatagacataaatgcatgcatcttctcataatttttaactcctcaggatttagaaacatatcccagggaataggaagctcttgcagaacagtaaagctggcagaacaaggaagaccacgaacacaacttacactatgcatagtcatagtatcacaatctggcaacagcgggtggtcttcagtcatagaagctcgggtttcattttcctcacaacgtggtaactgggctctggtgtaagggtgatgtctggcgcatgatgtcgagcgtgcgcgcaaccttgtcataatggagttgcttcctgacattctcgtattttgtatagcaaaacgcggccctggcagaacacactcttcttcgccttctatcctgccgcttagcgtgttccgtgtgatagttcaagtacaaccacactcttaagttggtcaaaagaatgctggcttcagttgtaatcaaaactccatcgcatctaatcgttctgaggaaatcatccaagcaatgcaactggattgtgtttcaagcaggagaggagagggaagagacggaagaaccatgttaatttttattccaaacgatctcgcagtacttcaaattgtagatcgcgcagatggcatctctcgcccccactgtgttggtgaaaaagcacagctagatcaaaagaaatgcgattttcaaggtgctcaacggtggcttccagcaaagcctccacgcgcacatccaagaacaaaagaataccaaaagaaggagcattttctaactcctcaatcatcatattacattcctgcaccattcccagataattttcagctttccagccttgaattattcgtgtcagttcttgtggtaaatccaatccacacattacaaacaggtcccggagggcgccctccaccaccattcttaaacacaccctcataatgacaaaatatcttgctcctgtgtcacctgtagcgaattgagaatggcaacatcaattgacatgcccttggctctaagttcttctttaagttctagttgtaaaaactctctcatattatcaccaaactgcttagccagaagccccccgggaacaagagcaggggacgctacagtgcagtacaagcgcagacctccccaattggctccagcaaaaacaagattggaataagcatattgggaaccgccagtaatatcatcgaagttgctggaaatataatcaggcagagtttcttgtaaaaattgaataaaagaaaaatttgccaaaaaaacattcaaaacctctgggatgcaaatgcaataggttaccgcgctgcgctccaacattgttagttttgaattagtctgcaaaaataaaaaaaaaaacaagcgtcatatcatagtagcctgacgaacagatggataaatcagtctttccatcacaagacaagccacagggtctccagctcgaccctcgtaaaacctgtcatcatgattaaacaacagcaccgaaagttcctcgcggtgaccagcatgaataattcttgatgaagcatacaatccagacatgttagcatcagttaacgagaaaaaacagccaacatagcctttgggtataattatgcttaatcgtaagtatagcaaagccacccctcgcggatacaaagtaaaaggcacaggagaataaaaaatataattatttctctgctgctgttcaggcaacgtcgcccccggtccctctaaatacacatacaaagcctcatcagccatggcttaccagacaaagtacagcgggcacacaaagcacaagctctaaagtgactctccaacctctccacaatatatatatacacaagccctaaactgacgtaatgggagtaaagtgtaaaaaatcccgccaaacccaacacacaccccgaaactgcgtcaccagggaaaagtacagtttcacttccgcaatcccaacaggcgtaacttcctctttctcacggtacgtgatatcccactaacttgcaacgtcattttcccacggtcgcaccgccccttttagccgttaaccccacagccaatcaccacacgatccacactttttaaaatcacctcatttacatattggcaccattccatctataaggtatattatatagataga

SEQ ID NO: 228 - DNA, 35689 bp, Artificial Sequence
  Genome sequence of NG-792A virus
tctatctatataatataccttatagatggaatggtgccaatatgtaaatgaggtgattttaaaaagtgtggatcgtgtggtgattggctgtggggttaacggctaaaaggggcggtgcgaccgtgggaaaatgacgttttgtgggggtggagtttttttgcaagttgtcgcgggaaatgtgacgcataaaaaggcttttttctcacggaactacttagttttcccacggtatttaacaggaaatgaggtagttttgaccggatgcaagtgaaaattgttgattttcgcgcgaaaactgaatgaggaagtgtttttctgaataatgtggtatttatggcagggtggagtatttgttcagggccaggtagactttgacccattacgtggaggtttcgattaccgtgttttttacctgaatttccgcgtaccgtgtcaaagtcttctgtttttacgtaggtgtcagctgatcgctagggtatttatacctcagggtttgtgtcaagaggccactcttgagtgccagcgagaagagttttctcctctgcgccggcagtttaataataaaaaaatgagagatttgcgatttctgcctcaggaaataatctctgctgagactggaaatgaaatattggagcttgtggtgcacgccctgatgggagacgatccggagccacctgtgcagctttttgagcctcctacgcttcaggaactgtatgatttagaggtagagggatcggaggattctaatgaggaagctgtaaatggcttttttaccgattctatgcttttagctgctaatgaagggttagaattagatccgcctttggacacttttgatactccaggggtaattgtggaaagcggtacaggtgtaagaaaattacctgatttgagttccgtggactgtgatttgcactgctatgaagacgggtttcctccgagtgatgaggaggaccatgaaaaggagcagtccatgcagactgcagcgggtgagggagtgaaggctgccaatgttggttttcagttggattgcccggagcttcctggacatggctgtaagtcttgtgaatttcacaggaaaaatactggagtaaaggaactgttatgttcgctttgttatatgagaacgcactgccactttatttacagtaagtgtgtttaagttaaaatttaaaggaatatgctgtttttcacatgtatattgagtgtgagttttgtgcttcttattataggtcctgtgtctgatgctgatgaatcaccatctcctgattctactacctcacctcctgagattcaagcacctgttcctgtggacgtgcgcaagcccattcctgtgaagcttaagcctgggaaacgtccagcagtggaaaaacttgaggacttgttacagggtggggacggacctttggacttgagtacacggaaacgtccaagacaataagtgttccatatccgtgtttacttaaggtgacgtcaatatttgtgtgacagtgcaatgtaataaaaatatgttaactgttcactggtttttattgctttttgggcggggactcaggtatataagtagaagcagacctgtgtggttagctcataggagctggctttcatccatggaggtttgggccattttggaagaccttaggaagactaggcaactgttagagaacgcttcggacggagtctccggtttttggagattctggttcgctagtgaattagctagggtagtttttaggataaaacaggactataaacaagaatttgaaaagttgttggtagattgcccaggactttttgaagctcttaatttgggccatcaggttcactttaaagaaaaagttttatcagttttagacttttcaaccccaggtagaactgctgctgctgtggcttttcttacttttatattagataaatggatcccgcagactcatttcagcaggggatacgttttggatttcatagccacagcattgtggagaacatggaaggttcgcaagatgaggacaatcttaggttactggccagtgcagcctttgggtgtagcgggaatcctgaggcatccaccggtcatgccagcggttctggaggaggaacagcaagaggacaacccgagagccggcctggaccctccagtggaggaggcggagtagctgacttgtctcctgaactgcaacgggtgcttactggatctacgtccactggacgggataggggcgttaagagggagagggcatctagtggtactgatgctagatctgagttggctttaagtttaatgagtcgcagacgtcctgaaaccatttggtggcatgaggttcagaaagagggaagggatgaagtttctgtattgcaggagaaatattcactggaacaggtgaaaacatgttggttggagcctgaggatgattgggaggtggccattaaaaattatgccaagatagctttgaggcctgataaacagtataagattactagacggattaatatccggaatgcttgttacatatctggaaatggggctgaggtggtaatagatactcaagacaaggcagttattagatgctgcatgatggatatgtggcctggggtagtcggtatggaagcagtaacttttgtaaatgttaagtttaggggagatggttataatggaatagtgtttatggccaataccaaacttatattgcatggttgtagcttttttggtttcaacaatacctgtgtagatgcctggggacaggttagtgtacggggatgtagtttctatgcgtgttggattgccacagctggcagaaccaagagtcaattgtctctgaagaaatgcatatttcaaagatgtaacctgggcattctgaatgaaggcgaagcaagggtccgccactgcgcttctacagatactggatgttttattttgattaagggaaatgccagcgtaaagcataacatgatttgcggtgcttccgatgagaggccttatcaaatgctcacttgtgctggtgggcattgtaatatgctggctactgtgcatattgtttcccatcaacgcaaaaaatggcctgtttttgatcacaatgtgatgacgaagtgtaccatgcatgcaggtgggcgtagaggaatgtttatgccttaccagtgtaacatgaatcatgtgaaagtgttgttggaaccagatgccttttccagaatgagcctaacaggaatttttgacatgaacatgcaaatctggaagatcctgaggtatgatgatacgagatcgagggtacgcgcatgcgaatgcggaggcaagcatgccaggttccagccggtgtgtgtagatgtgactgaagatctcagaccggatcatttggttattgcccgcactggagcagagttcggatccagtggagaagaaactgactaaggtgagtattgggaaaactttggggtgggattttcagatggacagattgagtaaaaatttgttttttctgtcttgcagctgtcatgagtggaaacgcttcttttaaggggggagtcttcagcccttatctgacagggcgtctcccatcctgggcaggagttcgtcagaatgttatgggatctactgtggatggaagacccgtccaacccgccaattcttcaacgctgacctatgctactttaagttcttcacctttggacgcagctgcagctgccgccgccgcttctgttgccgctaacactgtgcttggaatgggttactatggaagcatcatggctaattccacttcctctaataacccttctaccctgactcaggacaagttacttgtccttttggcccagctggaggctttgacccaacgtctgggtgaactttctcagcaggtggtcgagttgcgagtacaaactgagtctgctgtcggcacggcaaagtctaaataaaaaaatcccagaatcaatgaataaataaacaagcttgttgttgatttaaaatcaagtgtttttatttcatttttcgcgcacggtatgccctagaccaccgatctctatcattgagaactcggtggattttttccaggatcctatagaggtgggattgaatgtttagatacatgggcattaggccgtctttggggtggagatagctccattgaagggattcatgctccggggtagtgttgtaaatcacccagtcataacaaggtcgcagtgcatggtgttgcacaatatcttttagaagtaggctgattgccacagataagcccttggtgtaggtgtttacaaaccggttgagctgggatgggtgcattcggggtgaaattatgtgcattttggattggatttttaagttggcaatattgccgccaagatcccgtcttgggttcatgttatgaaggaccaccaagacggtgtatccggtacatttaggaaatttatcgtgcagcttggatggaaaagcgtggaaaaatttggagacacccttgtgtcctccaagattttccatgcactcatccatgataatagcaatggggccgtgggcagcggcgcgggcaaacacgttccgtgggtctgacacatcatagttatgttcctgagttaaatcatcataagccattttaatgaatttggggcggagagtaccagattggggtatgaatgttccttcgggccccggagcatagttcccctcacagatttgcatttcccaagctttcagttccgagggtggaatcatgtccacctggggggctatgaaaaacaccgtttctggggcgggggtgattaattgtgatgatagcaaatttctgagcaattgagatttgccacatccggtggggccataaatgattccgattacgggttgcaggtggtagtttagggaacggcaactgccgtcttctcgaagcaagggggccacctcgttcatcatttcccttacatgcatattttcccgcaccaaatccattaggaggcgctctcctcctagtgatagaagttcttgtagtgaggaaaagtttttcagcggtttcagaccgtcagccatgggcattttggagagagtttgctgcaaaagttctagtctgttccacagttcagtgatgtgttctatggcatctcgatccagcagacctcctcgtttcgcgggtttggacggctcctggaatagggtatgagacgatgggcgtccagcgctgccagggttcggtccttccagggtctcagtgttcgagtcagggttgtttccgtcacagtgaaggggtgtgcgcctgcttgggcgcttgccagggtgcgcttcagactcatcctgctggtcgaaaacttctgtcgcttggcgccctgtatgtcggccaagtagcagtttaccatgagttcgtagttgagcgcctcggctgcgtggcctttggcgcggagcttacctttggaagttttcttgcataccgggcagtataggcatttcagcgcatacaacttgggcgcaaggaaaacggattctggggagtatgcatctgcgccgcaggaggcgcaaacagtttcacattccaccagccaggttaaatccggttcattggggtcaaaaacaagttttccgccatattttttgatgcgtttcttacctttggtctccatgagttcgtgtcctcgttgagtgacaaacaggctgtccgtgtccccgtagactgattttacaggcctcttctccagtggagtgcctcggtcttcttcgtacaggaactctgaccactctgatacaaaggcgcgcgtccaggccagcacaaaggaggctatgtgggaggggtagcgatcgttgtcaaccagggggtccaccttttccaaagtatgcaaacacatgtcaccctcttcaacatccaggaatgtgattggcttgtaggtgtatttcacgtgacctggggtccccgctgggggggtataaaagggggcggttctttgctcttcctcactgtcttccggatcgctgtccaggaacgtcagctgttggggtaggtattccctctcgaaggcgggcatgacctctgcactcaggttgtcagtttctaagaacgaggaggatttgatattgacagtgccggttgagatgcctttcatgaggttttcgtccatctggtcagaaaacacaatttttttattgtcaagtttggtggcaaatgatccatacagggcgttggataaaagtttggcaatggatcgcatggtttggttcttttccttgtccgcgcgctctttggcggcgatgttgagttggacatactcgcgtgccaggcacttccattcggggaagatagttgttaattcatctggcacgattctcacttgccaccctcgattatgcaaggtaattaaatccacactggtggccacctcgcctcgaaggggttcattggtccaacagagcctacctcctttcctagaacagaaagggggaagtgggtctagcataagttcatcgggagggtctgcatccatggtaaagattcccggaagtaaatccttatcaaaatagctgatgggagtggggtcatctaaggccatttgccattctcgagctgccagtgcgcgctcatatgggttaaggggactgccccatggcatgggatgggtgagtgcagaggcatacatgccacagatgtcatagacgtagatgggatcctcaaagatgcctatgtaggttggatagcatcgcccccctctgatacttgctcgcacatagtcatatagttcatgtgatggcgctagcagccccggacccaagttggtgcgattgggtttttctgttctgtagacgatctggcgaaagatggcgtgagaattggaagagatggtgggtctttgaaaaatgttgaaatgggcatgaggtagacctacagagtctctgacaaagtgggcataagattcttgaagcttggttaccagttcggcggtgacaagtacgtctagggcgcagtagtcaagtgtttcttgaatgatgtcataacctggttggtttttcttttcccacagttcgcggttgagaaggtattcttcgcgatccttccagtactcttctagcggaaacccgtctttgtctgcacggtaagatcctagcatgtagaactgattaactgccttgtaagggcagcagcccttctctacgggtagagagtatgcttgagcagcttttcgtagcgaagcgtgagtaagggcaaaggtgtctctgaccatgactttgaggaattggtatttgaagtcgatgtcgtcacaggctccctgttcccagagttggaagtctacccgtttcttgtaggcggggttgggcaaagcgaaagtaacatcattgaagagaatcttgccggccctgggcatgaaattgcgagtgatgcgaaaaggctgtggtacttccgctcggttattgataacctgggcagctaggacgatctcgtcgaaaccgttgatgttgtgtcctacgatgtataattctatgaaacgcggcgtgcctctgacgtgaggtagcttactgagctcatcaaaggttaggtctgtggggtcagataaggcgtagtgttcgagagcccattcgtgcaggtgaggattcgctttaaggaaggaggaccagaggtccactgccagtgctgtttgtaactggtcccggtactgacgaaaatgccgtccgactgccattttttctggggtgacgcaatagaaggtttgggggtcctgccgccagcgatcccacttgagttttatggcgaggtcataggcgatgttgacgagccgctggtctccagagagtttcatgaccagcatgaaggggattagctgcttgccaaaggaccccatccaggtgtaggtttccacatcgtaggtgagaaagagcctttctgtgcgaggatgagagccaatcgggaagaactggatctcctgccaccagttggaggaatggctgttgatgtgatggaagtagaactccctgcgacgcgccgagcattcatgcttgtgcttgtacagacggccgcagtagtcgcagcgttgcacgggttgtatctcgtgaatgagttgtacctggcttcccttgacgagaaatttcagtgggaagccgaggcctggcgattgtatctcgtgctttactatgttgtctgcatcggcctgttcatcttctgtctcgatggtggtcatgctgacgagccctcgcgggaggcaagtccagacctcggcgcggcaggggcggagctcgaggacgagagcgcgcaggctggagctgtccagggtcctgagacgctgcggactcaggttagtaggcagtgtcaggagattaacttgcatgatcttttggagggcgtgcgggaggttcagatagtacttgatctcaacgggtccgttggtggagatgtcgatggcttgcagggttccgtgtcccttgggcgctaccaccgtgcccttgtttttcattttggacggcggtggctctgttgcttcttgcatgtttagaagcggtgtcgagggcgcgcaccgggcggcaggggcggctcgggacccggcggcatggctggcagtggtacgtcggcgccgcgcgcgggtaggttctggtactgcgccctgagaagactcgcatgcgcgacgacgcggcggttgacatcctggatctgacgcctctgggtgaaagctaccggccccgtgagcttgaacctgaaagagagttcaacagaatcaatctcggtatcgttgacggcggcttgcctaaggatttcttgcacgtcaccagagttgtcctggtaggcgatctccgccatgaactgctcgatctcttcctcttgaagatctccgcggcccgctctctcgacggtggccgcgaggtcgttggagatgcgcccaatgagttgagagaatgcattcatgcccgcctcgttccagacgcggctgtagaccacggcccccacgggatctctcgcgcgcatgaccacctgggcgaggttgagctccacgtggcgggtgaagaccgcatagttgcataggcgctggaaaaggtagttgagtgtggtggcgatgtgctcggtgacgaagaaatacatgatccatcgtctcagcggcatctcgctgacatcgcccagagcttccaagcgctccatggcctcgtagaagtccacggcaaaattaaaaaactgggagtttcgcgcggacacggtcaactcctcttccagaagacggataagttcggcgatggtggtgcgcacctcgcgctcgaaagcccctgggatttcttcctcaatctcttcttcttccactaacatctcttcctcttcaggtggggctgcaggaggagggggaacgcggcgacgccggcggcgcacgggcagacggtcgatgaatctttcaatgacctctccgcggcggcggcgcatggtttcagtgacggcgcggccgttctcgcgcggtcgcagagtaaaaacaccgccgcgcatctccttaaagtggtgactgggaggttctccgtttgggagggagagggcgctgattatacattttattaattggcccgtagggactgcacgcagagatctgatcgtgtcaagatccacgggatctgaaaacctttcgacgaaagcgtctaaccagtcacagtcacaaggtaggctgagtacggcttcttgtgggcgggggtggttatgtgttcggtctgggtcttctgtttcttcttcatctcgggaaggtgagacgatgctgctggtgatgaaattaaagtaggcagttctaagacggcggatggtggcgaggagcaccaggtctttgggtccggcttgctggatacgcaggcgattggccattccccaagcattatcctgacatctagcaagatctttgtagtagtcttgcatgagccgttctacgggcacttcttcctcacccgttctgccatgcatacgtgtgagtccaaatccgcgcattggttgtaccagtgccaagtcagctacgactctttcggcgaggatggcttgctgtacttgggtaagggtggcttgaaagtcatcaaaatccacaaagcggtggtaagctcctgtattaatggtgtaagcacagttggccatgactgaccagttaactgtctggtgaccagggcgcacgagctcggtgtatttaaggcgcgaataggcgcgggtgtcaaagatgtaatcgttgcaggtgcgcaccagatactggtaccctataagaaaatgcggcggtggttggcggtagagaggccatcgttctgtagctggagcgccaggggcgaggtcttccaacataaggcggtgatagccgtagatgtacctggacatccaggtgattcctgcggcggtagtagaagcccgaggaaactcgcgtacgcggttccaaatgttgcgtagcggcatgaagtagttcattgtaggcacggtttgaccagtgaggcgcgcgcagtcattgatgctctatagacacggagaaaatgaaagcgttcagcgactcgactccgtagcctggaggaacgtgaacgggttgggtcgcggtgtaccccggttcgagacttgtactcgagccggccggagccgcggctaacgtggtattggcactcccgtctcgacccagcctacaaaaatccaggatacggaatcgagtcgttttgctggtttccgaatggcagggaagtgagtcctattttttttttttgccgctcagatgcatcccgtgctgcgacagatgcgcccccaacaacagcccccctcgcagcagcagcagcagcaatcacaaaaggctgtccctgcaactactgcaactgccgccgtgagcggtgcgggacagcccgcctatgatctggacttggaagagggcgaaggactggcacgtctaggtgcgccttcacccgagcggcatccgcgagttcaactgaaaaaagattctcgcgaggcgtatgtgccccaacagaacctatttagagacagaagcggcgaggagccggaggagatgcgagcttcccgctttaacgcgggtcgtgagctgcgtcacggtttggaccgaagacgagtgttgcgggacgaggatttcgaagttgatgaaatgacagggatcagtcctgccagggcacacgtggctgcagccaaccttgtatcggcttacgagcagacagtaaaggaagagcgtaacttccaaaagtcttttaataatcatgtgcgaaccctgattgcccgcgaagaagttacccttggtttgatgcatttgtgggatttgatggaagctatcattcagaaccctactagcaaacctctgaccgcccagctgtttctggtggtgcaacacagcagagacaatgaggctttcagagaggcgctgctgaacatcaccgaacccgaggggagatggttgtatgatcttatcaacattctacagagtatcatagtgcaggagcggagcctgggcctggccgagaaggtggctgccatcaattactcggttttgagcttgggaaaatattacgctcgcaaaatctacaagactccatacgttcccatagacaaggaggtgaagatagatgggttctacatgcgcatgacgctcaaggtcttgaccctgagcgatgatcttggggtgtatcgcaatgacagaatgcatcgcgcggttagcgccagcaggaggcgcgagttaagcgacagggaactgatgcacagtttgcaaagagctctgactggagctggaaccgagggtgagaattacttcgacatgggagctgacttgcagtggcagcctagtcgcagggctctgagcgccgcgacggcaggatgtgagcttccttacatagaagaggcggatgaaggcgaggaggaagagggcgagtacttggaagactgatggcacaacccgtgttttttgctagatggaacagcaagcaccggatcccgcaatgcgggcggcgctgcagagccagccgtccggcattaactcctcggacgattggacccaggccatgcaacgtatcatggcgttgacgactcgcaaccccgaagcctttagacagcaaccccaggccaaccgtctatcggccatcatggaagctgtagtgccttcccgctctaatcccactcatgagaaggtcctggccatcgtgaacgcgttggtggagaacaaagctattcgtccagatgaggccggactggtatacaacgctctcttagaacgcgtggctcgctacaacagtagcaatgtgcaaaccaatttggaccgtatgataacagatgtacgcgaagccgtgtctcagcgcgaaaggttccagcgtgatgccaacctgggttcgctggtggcgttaaatgctttcttgagtactcagcctgctaatgtgccgcgtggtcaacaggattatactaactttttaagtgctttgagactgatggtatcagaagtacctcagagcgaagtgtatcagtccggtcctgattacttctttcagactagcagacagggcttgcagacggtaaatctgagccaagcttttaaaaaccttaaaggtttgtggggagtgcatgccccggtaggagaaagagcaaccgtgtctagcttgttaactccgaactcccgcctattattactgttggtagctcctttcaccgacagcggtagcatcgaccgtaattcctatttgggttacctactaaacctgtatcgcgaagccatagggcaaagtcaggtggacgagcagacctatcaagaaattacccaagtcagtcgcgctttgggacaggaagacactggcagtttggaagccactctgaacttcttgcttaccaatcggtctcaaaagatccctcctcaatatgctcttactgcggaggaggagaggatccttagatatgtgcagcagagcgtgggattgtttctgatgcaagagggggcaactccgactgcagcactggacatgacagcgcgaaatatggagcccagcatgtatgccagtaaccgacctttcattaacaaactgctggactacttgcacagagctgccgctatgaactctgattatttcaccaatgccatcttaaacccgcactggctgcccccacctggtttctacacgggcgaatatgacatgcccgaccctaatgacggatttctgtgggacgacgtggacagcgatgttttttcacctctttctgatcatcgcacgtggaaaaaggaaggcggcgatagaatgcattcttctgcatcgctgtccggggtcatgggtgctaccgcggctgagcccgagtctgcaagtccttttcctagtctacccttttctctacacagtgtacgtagcagcgaagtgggtagaataagtcgcccgagtttaatgggcgaagaggagtatctaaacgattccttgctcagaccggcaagagaaaaaaatttcccaaacaatggaatagaaagtttggtggataaaatgagtagatggaagacttatgctcaggatcacagagacgagcctgggatcatggggattacaagtagagcgagccgtagacgccagcgccatgacagacagaggggtcttgtgtgggacgatgaggattcggccgatgatagcagcgtgctggacttgggtgggagaggaaggggcaacccgtttgctcatttgcgccctcgcttgggtggtatgttgtaaaaaaaaataaaaaaaaaactcaccaaggccatggcgacgagcgtacgttcgttcttctttattatctgtgtctagtataatgaggcgagtcgtgctaggcggagcggtggtgtatccggagggtcctcctccttcgtacgagagcgtgatgcagcagcagcaggcgacggcggtgatgcaatccccactggaggctccctttgtgcctccgcgatacctggcacctacggagggcagaaacagcattcgttattcggaactggcacctcagtacgataccaccaggttgtatctggtggacaacaagtcggcggacattgcttctctgaactatcagaatgaccacagcaacttcttgaccacggtggtgcaaaacaatgactttacccctacggaagccagcacccagaccattaactttgatgaacgatcgcggtggggcggtcagctaaagaccatcatgcatactaacatgccaaacgtgaacgagtatatgtttagtaacaagttcaaagcgcgtgtgatggtgtccagaaaacctcccgacggtgctgcagttggggatacttatgatcacaagcaggatattttgaaatatgagtggttcgagtttactttgccagaaggcaacttttcagttactatgactattgatttgatgaacaatgccatcatagataattacttgaaagtgggtagacagaatggagtgcttgaaagtgacattggtgttaagttcgacaccaggaacttcaagctgggatgggatcccgaaaccaagttgatcatgcctggagtgtatacgtatgaagccttccatcctgacattgtcttactgcctggctgcggagtggattttaccgagagtcgtttgagcaaccttcttggtatcagaaaaaaacagccatttcaagagggttttaagattttgtatgaagatttagaaggtggtaatattccggccctcttggatgtagatgcctatgagaacagtaagaaagaacaaaaagccaaaatagaagctgctacagctgctgcagaagctaaggcaaacatagttgccagcgactctacaagggttgctaacgctggagaggtcagaggagacaattttgcgccaacacctgttccgactgcagaatcattattggccgatgtgtctgaaggaacggacgtgaaactcactattcaacctgtagaaaaagatagtaagaatagaagctataatgtgttggaagacaaaatcaacacagcctatcgcagttggtatctttcgtacaattatggcgatcccgaaaaaggagtgcgttcctggacattgctcaccacctcagatgtcacctgcggagcagagcaggtctactggtcgcttccagacatgatgaaggatcctgtcactttccgctccactagacaagtcagtaactaccctgtggtgggtgcagagcttatgcccgtcttctcaaagagcttctacaacgaacaagctgtgtactcccagcagctccgccagtccacctcgcttacgcacgtcttcaaccgctttcctgagaaccagattttaatccgtccgccggcgcccaccattaccaccgtcagtgaaaacgttcctgctctcacagatcacgggaccctgccgttgcgcagcagtatccggggagtccaacgtgtgaccgttactgacgccagacgccgcacctgtccctacgtgtacaaggcactgggcatagtcgcaccgcgcgtcctttcaagccgcactttctaaaaaaaaaaaaaatgtccattcttatctcgcccagtaataacaccggttggggtctgcgcgctccaagcaagatgtacggaggcgcacgcaaacgttctacccaacatcctgtccgtgttcgcggacattttcgcgctccatggggcgccctcaagggccgcactcgcgttcgaaccaccgtcgatgatgtaatcgatcaggtggttgccgacgcccgtaattatactcctactgcgcctacatctactgtggatgcagttattgacagtgtagtggctgacgctcgcaactatgctcgacgtaagagccggcgaaggcgcattgccagacgccaccgagctaccactgccatgcgagccgcaagagctctgctacgaagagctagacgcgtggggcgaagagccatgcttagggcggccagacgtgcagcttcgggcgccagcgccggcaggtcccgcaggcaagcagccgctgtcgcagcggcgactattgccgacatggcccaatcgcgaagaggcaatgtatactgggtgcgtgacgctgccaccggtcaacgtgtacccgtgcgcacccgtccccctcgcacttagaagatactgagcagtctccgatgttgtgtcccagcggcgaggatgtccaagcgcaaatacaaggaagaaatgctgcaggttatcgcacctgaagtctacggccaaccgttgaaggatgaaaaaaaaccccgcaaaatcaagcgggttaaaaaggacaaaaaagaagaggaagatggcgatgatgggctggcggagtttgtgcgcgagtttgccccacggcgacgcgtgcaatggcgtgggcgcaaagttcgacatgtgttgagacctggaacttcggtggtctttacacccggcgagcgttcaagcgctacttttaagcgttcctatgatgaggtgtacggggatgatgatattcttgagcaggcggctgaccgattaggcgagtttgcttatggcaagcgtagtagaataacttccaaggatgagacagtgtcgatacccttggatcatggaaatcccacccctagtcttaaaccggtcactttgcagcaagtgttacccgtaactccgcgaacaggtgttaaacgcgaaggtgaagatttgtatcccactatgcaactgatggtacccaaacgccagaagttggaggacgttttggagaaagtaaaagtggatccagatattcaacctgaggttaaagtgagacccattaagcaggtagcgcctggtctgggggtacaaactgtagacattaagattcccactgaaagtatggaagtgcaaactgaacccgcaaagcctactgccacctccactgaagtgcaaacggatccatggatgcccatgcctattacaactgacgccgccggtcccactcgaagatcccgacgaaagtacggtccagcaagtctgttgatgcccaattatgttgtacacccatctattattcctactcctggttaccgaggcactcgctactatcgcagccgaaacagtacctcccgccgtcgccgcaagacacctgcaaatcgcagtcgtcgccgtagacgcacaagcaaaccgactcccggcgccctggtgcggcaagtgtaccgcaatggtagtgcggaacctttgacactgccgcgtgcgcgttaccatccgagtatcatcacttaatcaatgttgccgctgcctccttgcagatatggccctcacttgtcgccttcgcgttcccatcactggttaccgaggaagaaactcgcgccgtagaagagggatgttgggacgcggaatgcgacgctacaggcgacggcgtgctatccgcaagcaattgcggggtggttttttaccagccttaattccaattatcgctgctgcaattggcgcgataccaggcatagcttccgtggcggttcaggcctcgcaacgacattgacattggaaaaaaacgtataaataaaaaaaaaaaaatacaatggactctgacactcctggtcctgtgactatgttttcttagagatggaagacatcaatttttcatccttggctccgcgacacggcacgaagccgtacatgggcacctggagcgacatcggcacgagccaactgaacgggggcgccttcaattggagcagtatctggagcgggcttaaaaattttggctcaaccataaaaacatacgggaacaaagcttggaacagcagtacaggacaggcgcttagaaataaacttaaagaccagaacttccaacaaaaagtagtcgatgggatagcttccggcatcaatggagtggtagatttggctaaccaggctgtgcagaaaaagataaacagtcgtttggacccgccgccagcaaccccaggtgaaatgcaagtggaggaagaaattcctccgccagaaaaacgaggcgacaagcgtccgcgtcccgatttggaagagacgctggtgacgcgcgtagatgaaccgccttcttatgaggaagcaacgaagcttggaatgcccaccactagaccgatagccccaatggccaccggggtgatgaaaccttctcagttgcatcgacccgtcaccttggatttgccccctccccctgctgctactgctgtacccgcttctaagcctgtcgctgccccgaaaccagtcgccgtagccaggtcacgtcccgggggcgctcctcgtccaaatgcgcactggcaaaatactctgaacagcatcgtgggtctaggcgtgcaaagtgtaaaacgccgtcgctgcttttaattaaatatggagtagcgcttaacttgcctatctgtgtatatgtgtcattacacgccgtcacagcagcagaggaaaaaaggaagaggtcgtgcgtcgacgctgagttactttcaagatggccaccccatcgatgctgccccaatgggcatacatgcacatcgccggacaggatgcttcggagtacctgagtccgggtctggtgcagttcgcccgcgccacagacacctacttcaatctgggaaataagtttagaaatcccaccgtagcgccgacccacgatgtgaccaccgaccgtagccagcggctcatgttgcgcttcgtgcccgttgaccgggaggacaatacatactcttacaaagtgcggtacaccctggccgtgggcgacaacagagtgctggatatggccagcacgttctttgacattaggggtgtgttggacagaggtcccagtttcaaaccctattctggtacggcttacaactccctggctcctaaaggcgctccaaatacatctcagtggattgcagaaggtgtaaaaaatacaactggtgaggaacacgtaacagaagaggaaaccaatactactacttacacttttggcaatgctcctgtaaaagctgaagctgaaattacaaaagaaggactcccagtaggtttggaagtttcagatgaagaaagtaaaccgatttatgctgataaaacatatcagccagaacctcagctgggagatgaaacttggactgaccttgatggaaaaaccgaaaagtatggaggcagggctctcaaacccgatactaagatgaaaccatgctacgggtcctttgccaaacctactaatgtgaaaggcggtcaggcaaaacaaaaaacaacggagcagccaaatcagaaagtcgaatatgatatcgacatggagttttttgatgcggcatcgcagaaaacaaacttaagtcctaaaattgtcatgtatgcagaaaatgtaaatttggaaactccagacactcatgtagtgtacaaacctggaacagaagacacaagttccgaagctaatttgggacaacaatctatgcccaacagacccaactacattggcttcagagataactttattggacttatgtactataacagtactggtaacatgggggtgctggctggtcaagcgtctcagttaaatgcagtggttgacttgcaggacagaaacacagaactttcttaccaactcttgcttgactctctgggcgacagaaccagatactttagcatgtggaatcaggctgtggacagttatgatcctgatgtacgtgttattgaaaatcatggtgtggaagatgaacttcccaactactgttttccactggacggcataggtgttccaacaaccagttacaaatcaatagttccaaatggagacaatgcgcctaattggaaggaacctgaagtaaatggaacaagtgagatcggacagggtaatttgtttgccatggaaattaaccttcaagccaatctatggcgaagtttcctttattccaatgtggctctatatctcccagactcgtacaaatacaccccgtccaatgtcactcttccagaaaacaaaaacacctacgactacatgaacgggcgggtggtgccgccatctctagtagacacctatgtgaacattggtgccaggtggtctctggatgccatggacaatgtcaacccattcaaccaccaccgtaacgctggcttgcgttaccgatccatgcttctgggtaacggacgttatgtgcctttccacatacaagtgcctcaaaaattcttcgctgttaaaaacctgctgcttctcccaggctcctacacttatgagtggaactttaggaaggatgtgaacatggttctacagagttccctcggtaacgacctgcgggtagatggcgccagcatcagtttcacgagcatcaacctctatgctacttttttccccatggctcacaacaccgcttccacccttgaagccatgctgcggaatgacaccaatgatcagtcattcaacgactacctatctgcagctaacatgctctaccccattcctgccaatgcaaccaatattcccatttccattccttctcgcaactgggcggctttcagaggctggtcatttaccagactgaaaaccaaagaaactccctctttggggtctggatttgacccctactttgtctattctggttctattccctacctggatggtaccttctacctgaaccacacttttaagaaggtttccatcatgtttgactcttcagtgagctggcctggaaatgacaggttactatctcctaacgaatttgaaataaagcgcactgtggatggcgaaggctacaacgtagcccaatgcaacatgaccaaagactggttcttggtacagatgctcgccaactacaacatcggctatcagggcttctacattccagaaggatacaaagatcgcatgtattcatttttcagaaacttccagcccatgagcaggcaggtggttgatgaggtcaattacaaagacttcaaggccgtcgccataccctaccaacacaacaactctggctttgtgggttacatggctccgaccatgcgccaaggtcaaccctatcccgctaactatccctatccactcattggaacaactgccgtaaatagtgttacgcagaaaaagttcttgtgtgacagaaccatgtggcgcataccgttctcgagcaacttcatgtctatgggggcccttacagacttgggacagaatatgctctatgccaactcagctcatgctctggacatgacctttgaggtggatcccatggatgagcccaccctgctttatcttctcttcgaagttttcgacgtggtcagagtgcatcagccacaccgcggcatcatcgaggcagtctacctgcgtacaccgttctcggccggtaacgctaccacgtaagaagcttcttgcttcttgcaaatagcagctgcaaccatggcctgcggatcccaaaacggctccagcgagcaagagctcagagccattgtccaagacctgggttgcggaccctattttttgggaacctacgataagcgcttcccggggttcatggcccccgataagctcgcctgtgccattgtaaatacggccggacgtgagacggggggagagcactggttggctttcggttggaacccacgttctaacacctgctacctttttgatccttttggattctcggatgatcgtctcaaacagatttaccagtttgaatatgagggtctcctgcgccgcagcgctcttgctaccaaggaccgctgtattacgctggaaaaatctacccagaccgtgcagggtccccgttctgccgcctgcggacttttctgctgcatgttccttcacgcctttgtgcactggcctgaccgtcccatggacggaaaccccaccatgaaattgctaactggagtgccaaacaacatgcttcattctcctaaagtccagcccaccctgtgtgacaatcaaaaagcactctaccattttcttaatacccattcgccttattttcgctcccatcgtacacacatcgaaagggccactgcgttcgaccgtatggatgttcaataatgactcatgtaaacaacgtgttcaataaacatcactttatttttttacatgtatcaaggctctgcattacttatttatttacaagtcgaatgggttctgacgagaatcagaatgacccgcaggcagtgatacgttgcggaactgatacttgggttgccacttgaattcgggaatcaccaacttgggaaccggtatatcgggcaggatgtcactccacagctttctggtcagctgcaaagctccaagcaggtcaggagccgaaatcttgaaatcacaattaggaccagtgctttgagcgcgagagttgcggtacaccggattgcagcactgaaacaccatcagcgacggatgtctcacgcttgccagcacggtgggatctgcaatcatgcccacatccagatcttcagcattggcaatgctgaacggggtcatcttgcaggtctgcctacccatggcgggcacccaattaggcttgtggttgcaatcgcagtgcagggggatcagtatcatcttggcctgatcctgtctgattcctggatacacggctctcatgaaagcatcatattgcttgaaagcctgctgggctttactaccctcggtataaaacatcccgcaggacctgctcgaaaactggttagctgcacagccggcatcattcacacagcagcgggcgtcattgttagctatttgcaccacacttctgccccagcggttttgggtgattttggttcgctcgggattctcctttaaggctcgttgtccgttctcgctggccacatccatctcgataatctgctccttctgaatcataatattgccatgcaggcacttcagcttgccctcataatcattgcagccatgaggccacaacgcacagcctgtacattcccaattatggtgggcgatctgagaaaaagaatgtatcattccctgcagaaatcttcccatcatcgtgctcagtgtcttgtgactagtgaaagttaactggatgcctcggtgctcctcgtttacgtactggtgacagatgcgcttgtattgttcgtgttgctcaggcattagtttaaaagaggttctaagttcgttatccagcctgtacttctccatcagcagacacatcacttccatgcctttctcccaagcagacaccaggggcaagctaatcggattcttaacagtgcaggcagcagctcctttagccagagggtcatctttagcgatcttctcaatgcttcttttgccatccttctcaacgatgcgcacgggcgggtagctgaaacccactgctacaagttgcgcctcttctctttcttcttcgctgtcttgactgatgtcttgcatggggatatgtttggtcttccttggcttctttttggggggtatcggaggaggaggactgtcgctccgttccggagacagggaggattgtgacgtttcgctcaccattaccaactgactgtcggtagaagaacctgaccccacacggcgacaggtgtttctcttcgggggcagaggtggaggcgattgcgaagggctgcggtccgacctggaaggcggatgactggcagaaccccttccgcgttcgggggtgtgctccctgtggcggtcgcttaactgatttccttcgcggctggccattgtgttctcctaggcagagaaacaacagacatggaaactcagccattgctgtcaacatcgccacgagtgccatcacatctcgtcctcagcgacgaggaaaaggagcagagcttaagcattccaccgcccagtcctgccaccacctctaccctagaagataaggaggtcgacgcatctcatgacatgcagaataaaaaagcgaaagagtctgagacagacatcgagcaagacccgggctatgtgacaccggtggaacacgaggaagagttgaaacgctttctagagagagaggatgaaaactgcccaaaacaacgagcagataactatcaccaagatgctggaaatagggatcagaacaccgactacctcatagggcttgacggggaagacgcgctccttaaacatctagcaagacagtcgctcatagtcaaggatgcattattggacagaactgaagtgcccatcagtgtggaagagctcagccgcgcctacgagcttaacctcttttcacctcgtactccccccaaacgtcagccaaacggcacctgcgagccaaatcctcgcttaaacttttatccagcttttgctgtgccagaagtactggctacctatcacatcttttttaaaaatcaaaaaattccagtctcctgccgcgctaatcgcacccgcgccgatgccctactcaatctgggacctggttcacgcttacctgatatagcttccttggaagaggttccaaagatcttcgagggtctgggcaataatgagactcgggccgcaaatgctctgcaaaagggagaaaatggcatggatgagcatcacagcgttctggtggaattggaaggcgataatgccagactcgcagtactcaagcgaagcatcgaggtcacacacttcgcatatcccgctgtcaacctgccccctaaagtcatgacggcggtcatggaccagttactcattaagcgcgcaagtcccctttcagaagacatgcatgacccagatgcctgtgatgagggtaaaccagtggtcagtgatgagcagctaacccgatggctgggcaccgactctcccagggatttggaagagcgtcgcaagcttatgatggccgtggtgctggttaccgtagaactagagtgtctccgacgtttctttaccgattcagaaaccttgcgcaaactcgaagagaatctgcactacacttttagacacggctttgtgcggcaggcatgcaagatatctaacgtggaactcaccaacctggtttcctacatgggtattctgcatgagaatcgcctaggacaaagcgtgctgcacagcaccctgaagggggaagcccgccgtgattacatccgcgattgtgtctatctgtacctgtgccacacgtggcaaaccggcatgggtgtatggcagcaatgtttagaagaacagaacttgaaagagcttgacaagctcttacagaaatctcttaaggttctgtggacagggttcgacgagcgcaccgtcgcttccgacctggcagacctcatcttcccagagcgtctcagggttactttgcgaaacggattgcctgactttatgagccagagcatgcttaacaattttcgctctttcatcctggaacgctccggtatcctgcccgccacctgctgcgcactgccctccgactttgtgcctctcacctaccgcgagtgccccccgccgctatggagtcactgctacctgttccgtctggccaactatctctcctaccactcggatgtgatcgaggatgtgagcggagacggcttgctggagtgtcactgccgctgcaatctgtgcacgccccaccggtccctagcttgcaacccccagttgatgagcgaaacccagataataggcacctttgaattgcaaggccccagcagccaaggcgatgggtcttctcctgggcaaagtttaaaactgaccccgggactgtggacctccgcctacttgcgcaagtttgctccggaagattaccacccctatgaaatcaagttctatgaggaccaatcacagcctccaaaggccgaactttcggcctgcgtcatcacccagggggcaattctggcccaattgcaagccatccaaaaatcccgccaagaatttctactgaaaaagggtaagggggtctaccttgacccccagaccggcgaggaactcaacacaaggttccctcaggatgtcccaacgacgagaaaacaagaagttgaaggtgcagccgccgcccccagaagatatggaggaagattgggacagtcaggcagaggaggcggaggaggacagtctggaggacagtctggaggaagacagtttggaggaggaaaacgaggaggcagaggaggtggaagaagtaaccgccgacaaacagttatcctcggctgcggagacaagcaacagcgctaccatctccgctccgagtcgaggaacccggcggcgtcccagcagtagatgggacgagaccggacgcttcccgaacccaaccagcgcttccaagaccggtaagaaggatcggcagggatacaagtcctggcgggggcataagaatgccatcatctcctgcttgcatgagtgcgggggcaacatatccttcacgcggcgctacttgctattccaccatggggtgaactttccgcgcaatgttttgcattactaccgtcacctccacagcccctactatagccagcaaatcccggcagtctcgacagataaagacagcggcggcgacctccaacagaaaaccagcagcggcagttagaaaatacacaacaagtgcagcaacaggaggattaaagattacagccaacgagccagcgcaaacccgagagttaagaaatcggatctttccaaccctgtatgccatcttccagcagagtcggggtcaagagcaggaactgaaaataaaaaaccgatctctgcgttcgctcaccagaagttgtttgtatcacaagagcgaagatcaacttcagcgcactctcgaggacgccgaggctctcttcaacaagtactgcgcgctgactcttaaagagtaggcagcgaccgcgcttattcaaaaaaggcgggaattacatcatcctcgacatgagtaaagaaattcccacgccttacatgtggagttatcaaccccaaatgggattggcggcaggcgcctcccaggactactccacccgcatgaattggctcagcgccgggccttctatgatttctcgagttaatgatatacgcgcctaccgaaaccaaatacttttggaacagtcagctcttaccaccacgccccgccaacaccttaatcccagaaattggcccgccgccctagtgtaccaggaaagtcccgctcccaccactgtattacttcctcgagacgcccaggccgaagtccaaatgactaatgcaggtgcgcagttagctggcggctccaccctatgtcgtcacaggcctcggcataatataaaacgcctgatgatcagaggccgaggtatccagctcaacgacgagtcggtgagctctccgcttggtctacgaccagacggaatctttcagattgccggctgcgggagatcttccttcacccctcgtcaggctgttctgactttggaaagttcgtcttcgcaaccccgctcgggcggaatcgggaccgttcaatttgtggaggagtttactccctctgtctacttcaaccccttctccggatctcctgggcattacccggacgagttcataccgaacttcgacgcgattagcgagtcagtggacggctacgattgatgtctggtgacgcggctgagctatctcggctgcgacatctagaccactgccgccgctttcgctgctttgcccgggaactcattgagttcatctacttcgaactccccaaggatcaccctcaaggtccggcccacggagtgcggatttctatcgaaggcaaaatagactctcgcctgcaacgaattttctcccagcggcccgtgctgatcgagcgagaccagggaaacaccacggtttccatctactgcatttgtaatcaccccggattgcatgaaagcctttgctgtcttatgtgtactgagtttaataaaaactgaattaagactctcctacggactgccgcttcttcaacccggattttacaaccagaagaacgaaacttttcctgtcgtccaggactctgttaacttcacctttcctactcacaaactagaagctcaacgactacaccgcttttccagaagcattttccctactaatactactttcaaaaccggaggtgagctccaaggtcttcctacagaaaacccttgggtggaagcgggccttgtagtgctaggaattcttgcgggtgggcttgtgattattctttgctacctatacacaccttgcttcactttcttagtggtgttgtggtattggtttaaaaaatggggcccatactagtcttgcttgttttactttcgcttttggaaccgggttctgccaattacgatccatgtctagacttcgacccagaaaactgcacacttacttttgcacccgacacaagccgcatctgtggagttcatcgcctctcttacgaacttggcccccaacgacaaaaatttacctgcatggtgggaatcaaccccatagttatcacccagcaaagtggagatactaagggttgcattcactgctcctgcgattccatcgagtgcacctacaccctgctgaagaccctatgcggcctaagagacctgctaccaatgaattaaaaaatgattaataaaaaatcacttacttgaaatcagcaataaggtctctgttgaaattttctcccagcagcacctcacttccctcttcccaactctggtattctaaaccccgttcagcggcatactttctccatactttaaaggggatgtcaaattttagctcctctcctgtacccacaatcttcatgtctttcttcccagatgaccaagagagtccggctcagtgactccttcaaccctgtctacccctatgaagatgaaagcacctcccaacacccctttataaacccagggtttatttccccaaatggcttcacacaaagcccaaacggagttcttactttaaaatgtttaaccccactaacaaccacaggcggatctctacagctaaaagtgggagggggacttacagtggatgacaccaacggttttttgaaagaaaacataagtgccaccacaccactcgttaagactggtcactctataggtttaccactaggagccggattgggaacgaatgaaaataaactttgtatcaaattaggacaaggacttacattcaattcaaacaacatttgcattgatgacaatattaacaccttatggacaggagtcaaccccaccgaagccaactgtcaaatcatgaactccagtgaatctaatgattgcaaattaattctaacactagttaaaactggagcactagtcactgcatttgtttatgttataggagtatctaacaattttaatatgctaactacacacagaaatataaattttactgcagagctgtttttcgattctactggtaatttactaactagactctcatccctcaaaactccacttaatcataaatcaggacaaaacatggctactggtgccattactaatgctaaaggtttcatgcccagcacgactgcctatcctttcaatgataattctagagaaaaagaaaactacatttacggaacttgttactacacagctagtgatcgcactgcttttcccattgacatatctgtcatgcttaaccgaagagcaataaatgacgagacatcatattgtattcgtataacttggtcctggaacacaggagatgccccagaggtgcaaacctctgctacaaccctagtcacctccccatttaccttttactacatcagagaagacgactgacaaataaagtttgcgatcgccaggcccaccatgtgccaccaacagctcgtcatcagctggttctccctcgtgtttctcgctagccctctggtggccatctgggagctcaaaaaggacgtgtacgtcgtggagctggactggtaccccgatgctcccggcgaaatggtcgtgctgacatgcgacacacccgaagaggatggcatcacatggacactggatcagagcagcgaagtcctcggaagcggcaagacactgaccattcaagtgaaggaattcggcgatgccggccagtacacatgtcacaagggaggcgaagtgctgagccattctctgctgctgctgcacaaaaaggaggatggcatttggagcaccgacattctgaaagaccagaaggagcccaagaacaaaacctttctgagatgcgaggccaaaaactatagcggaagattcacatgctggtggctcaccaccatctccaccgatctgacattctccgtgaagtcctctagaggatccagcgaccctcaaggcgtcacatgtggcgccgctacactgtccgctgaaagggtgagaggcgataacaaggagtacgagtactccgtcgagtgccaagaggatagcgcttgccccgccgctgaggagtctctgcctatcgaagtgatggtggacgctgtgcacaagctgaagtatgagaactatacaagctccttctttatcagagatatcattaagcccgatccccccaaaaatctccagctcaagcctctgaagaactctagacaagtggaagtgagctgggaataccccgacacatggagcaccccccatagctatttctccctcaccttttgcgtgcaagtgcaaggcaaaagcaagagggagaagaaggatagagtctttaccgacaagacctccgctaccgtcatctgtagaaagaacgcttccatctccgtgagggctcaagatagatattacagctccagctggtccgaatgggcctccgtgccttgtagcggaggaggaggatccggcggcggcggaagcggcggcggaggatccagaaatctgcccgtggccacccccgaccccggcatgtttccttgtctgcaccattcccagaaccttctgagagccgtgtccaacatgctgcagaaggctagacagacactcgaattctacccttgcaccagcgaagagattgaccacgaggacattaccaaggacaagacatccaccgtggaagcttgtctgcctctggagctgacaaagaacgagagctgcctcaattctagagagacaagcttcatcacaaacggcagctgtctggcttctagaaagacatccttcatgatggctctgtgtctgtccagcatctatgaagatctgaagatgtatcaagtggaattcaagacaatgaacgccaaactgctcatggaccccaagaggcagattttcctcgaccagaacatgctcgccgtgatcgacgagctgatgcaagctctgaacttcaactccgagacagtcccccagaaaagctctctggaggagcccgacttctacaaaaccaagattaagctgtgcatcctcctccacgcctttagaatcagagccgtcacaatcgatagagtcatgagctatctgaacgcctccggatccggagaaggaagaggctctctgctgacatgcggcgatgtggaagagaaccccggccccgctctgacatttgctctgctggtcgctctgctggtcctcagctgcaaatccagctgttccgtgggctgcgacctccctcagacacactctctgggctccagaaggacactgatgctcctcgcccagatgaggaggatcagcctcttcagctgcctcaaggataggcacgactttggcttcccccaagaagagtttggcaatcagttccaaaaggctgaaacaatccccgtgctccacgaaatgatccagcagattttcaatctgtttagcaccaaggattccagcgctgcttgggacgagacactgctggacaagttctacaccgagctctaccagcaactcaatgacctcgaggcttgcgtgatccaaggcgtcggagtgacagagacccctctgatgaaagaggactccattctggctgtgagaaagtacttccagagaatcaccctctatctgaaagagaaaaagtatagcccttgcgcttgggaagtggtgagggccgagatcatgaggagcttttctctgagcacaaacctccaagagtctctgagaagcaaggaaggcagcggacaatgcaccaattatgctctgctgaagctggccggagatgtggagagcaatcccggccccgctcccagaagagctagaggctgtagaacactcggactccccgctctgctgctgctgctgctgctgagaccccccgccacaagaggcatcacatgccctccccccatgtccgtcgagcacgccgatatctgggtcaagtcctactccctctactccagagagaggtacatctgtaacagcggattcaagaggaaggctggaacatcctctctgaccgagtgcgtgctgaacaaggccaccaatgtggctcactggaccaccccttccctcaaatgcattagagacggctccggagccaccaatttttctctgctcaagcaagctggcgacgtggaagagaatcccggacccgactggacatggagaattctctttctggtggctgccgccaccggcgcccattccaattgggtgaatgtgatcagcgatctgaagaagatcgaggacctcatccagagcatgcacatcgacgctacactgtacacagagagcgatgtccatcccagctgcaaggtgaccgccatgaaatgttttctgctggagctccaagtgatttccctcgagagcggagacgcttccatccacgacaccgtcgaaaatctgatcattctggccaacaactctctgagcagcaacggcaacgtgacagagagcggatgcaaggagtgcgaggagctggaggagaagaacattaaggagtttctgcaaagcttcgtgcacatcgtccagatgttcatcaacaccagctgagctagcttgactgactgagatacagcgtaccttcagctcacagacatgataagatacattgatgagtttggacaaaccacaactagaatgcagtgaaaaaaatgctttatttgtgaaatttgtgatgctattgctttatttgtaaccattataagctgcaataaacaagttaacaacaacaattgcattcattttatgtttcaggttcagggggaggtgtgggaggttttttaaagcaagtaaaacctctacaaatgtggtagtcgtcagctatcctgcaggaacttgtttatttgaaaatcaattcacaaaatccgagtagttattttgcctcccccttcccatttaacagaatacaccaatctctccccacgcacagctttaaacatttggataccattagatatagacatggttttagattccacattccaaacagtttcagagcgagccaatctggggtcagtgatagataaaaatccatcgggatagtcttttaaagcgctttcacagtccaactgctgcggatgcgactccggagtctggatcacggtcatctggaagaagaacgatgggaatcataatccgaaaacggtatcggacgattgtgtctcatcaaacccacaagcagccgctgtctgcgtcgctccgtgcgactgctgtttatgggatcagggtccacagtgtcctgaagcatgattttaatagcccttaacatcaactttctggtgcgatgcgcgcagcaacgcattctgatttcactcaaatctttgcagtaggtacaacacattattacaatattgtttaataaaccataattaaaagcgctccagccaaaactcatatctgatataatcgcccctgcatgaccatcataccaaagtttaatataaattaaatgacgttccctcaaaaacacactacccacatacatgatctcttttggcatgtgcatattaacaatctgtctgtaccatggacaacgttggttaatcatgcaacccaatataaccttccggaaccacactgccaacaccgctcccccagccatgcattgaagtgaaccctgctgattacaatgacaatgaagaacccaattctctcgaccgtgaatcacttgagaatgaaaaatatctatagtggcacaacatagacataaatgcatgcatcttctcataatttttaactcctcaggatttagaaacatatcccagggaataggaagctcttgcagaacagtaaagctggcagaacaaggaagaccacgaacacaacttacactatgcatagtcatagtatcacaatctggcaacagcgggtggtcttcagtcatagaagctcgggtttcattttcctcacaacgtggtaactgggctctggtgtaagggtgatgtctggcgcatgatgtcgagcgtgcgcgcaaccttgtcataatggagttgcttcctgacattctcgtattttgtatagcaaaacgcggccctggcagaacacactcttcttcgccttctatcctgccgcttagcgtgttccgtgtgatagttcaagtacaaccacactcttaagttggtcaaaagaatgctggcttcagttgtaatcaaaactccatcgcatctaatcgttctgaggaaatcatccaagcaatgcaactggattgtgtttcaagcaggagaggagagggaagagacggaagaaccatgttaatttttattccaaacgatctcgcagtacttcaaattgtagatcgcgcagatggcatctctcgcccccactgtgttggtgaaaaagcacagctagatcaaaagaaatgcgattttcaaggtgctcaacggtggcttccagcaaagcctccacgcgcacatccaagaacaaaagaataccaaaagaaggagcattttctaactcctcaatcatcatattacattcctgcaccattcccagataattttcagctttccagccttgaattattcgtgtcagttcttgtggtaaatccaatccacacattacaaacaggtcccggagggcgccctccaccaccattcttaaacacaccctcataatgacaaaatatcttgctcctgtgtcacctgtagcgaattgagaatggcaacatcaattgacatgcccttggctctaagttcttctttaagttctagttgtaaaaactctctcatattatcaccaaactgcttagccagaagccccccgggaacaagagcaggggacgctacagtgcagtacaagcgcagacctccccaattggctccagcaaaaacaagattggaataagcatattgggaaccgccagtaatatcatcgaagttgctggaaatataatcaggcagagtttcttgtaaaaattgaataaaagaaaaatttgccaaaaaaacattcaaaacctctgggatgcaaatgcaataggttaccgcgctgcgctccaacattgttagttttgaattagtctgcaaaaataaaaaaaaaaacaagcgtcatatcatagtagcctgacgaacagatggataaatcagtctttccatcacaagacaagccacagggtctccagctcgaccctcgtaaaacctgtcatcatgattaaacaacagcaccgaaagttcctcgcggtgaccagcatgaataattcttgatgaagcatacaatccagacatgttagcatcagttaacgagaaaaaacagccaacatagcctttgggtataattatgcttaatcgtaagtatagcaaagccacccctcgcggatacaaagtaaaaggcacaggagaataaaaaatataattatttctctgctgctgttcaggcaacgtcgcccccggtccctctaaatacacatacaaagcctcatcagccatggcttaccagacaaagtacagcgggcacacaaagcacaagctctaaagtgactctccaacctctccacaatatatatatacacaagccctaaactgacgtaatgggagtaaagtgtaaaaaatcccgccaaacccaacacacaccccgaaactgcgtcaccagggaaaagtacagtttcacttccgcaatcccaacaggcgtaacttcctctttctcacggtacgtgatatcccactaacttgcaacgtcattttcccacggtcgcaccgccccttttagccgttaaccccacagccaatcaccacacgatccacactttttaaaatcacctcatttacatattggcaccattccatctataaggtatattatatagataga

SEQ ID NO: 229 - DNA, 35503 bp, Artificial Sequence
  Genome sequence of NG-794A virus
tctatctatataatataccttatagatggaatggtgccaatatgtaaatgaggtgattttaaaaagtgtggatcgtgtggtgattggctgtggggttaacggctaaaaggggcggtgcgaccgtgggaaaatgacgttttgtgggggtggagtttttttgcaagttgtcgcgggaaatgtgacgcataaaaaggcttttttctcacggaactacttagttttcccacggtatttaacaggaaatgaggtagttttgaccggatgcaagtgaaaattgttgattttcgcgcgaaaactgaatgaggaagtgtttttctgaataatgtggtatttatggcagggtggagtatttgttcagggccaggtagactttgacccattacgtggaggtttcgattaccgtgttttttacctgaatttccgcgtaccgtgtcaaagtcttctgtttttacgtaggtgtcagctgatcgctagggtatttatacctcagggtttgtgtcaagaggccactcttgagtgccagcgagaagagttttctcctctgcgccggcagtttaataataaaaaaatgagagatttgcgatttctgcctcaggaaataatctctgctgagactggaaatgaaatattggagcttgtggtgcacgccctgatgggagacgatccggagccacctgtgcagctttttgagcctcctacgcttcaggaactgtatgatttagaggtagagggatcggaggattctaatgaggaagctgtaaatggcttttttaccgattctatgcttttagctgctaatgaagggttagaattagatccgcctttggacacttttgatactccaggggtaattgtggaaagcggtacaggtgtaagaaaattacctgatttgagttccgtggactgtgatttgcactgctatgaagacgggtttcctccgagtgatgaggaggaccatgaaaaggagcagtccatgcagactgcagcgggtgagggagtgaaggctgccaatgttggttttcagttggattgcccggagcttcctggacatggctgtaagtcttgtgaatttcacaggaaaaatactggagtaaaggaactgttatgttcgctttgttatatgagaacgcactgccactttatttacagtaagtgtgtttaagttaaaatttaaaggaatatgctgtttttcacatgtatattgagtgtgagttttgtgcttcttattataggtcctgtgtctgatgctgatgaatcaccatctcctgattctactacctcacctcctgagattcaagcacctgttcctgtggacgtgcgcaagcccattcctgtgaagcttaagcctgggaaacgtccagcagtggaaaaacttgaggacttgttacagggtggggacggacctttggacttgagtacacggaaacgtccaagacaataagtgttccatatccgtgtttacttaaggtgacgtcaatatttgtgtgacagtgcaatgtaataaaaatatgttaactgttcactggtttttattgctttttgggcggggactcaggtatataagtagaagcagacctgtgtggttagctcataggagctggctttcatccatggaggtttgggccattttggaagaccttaggaagactaggcaactgttagagaacgcttcggacggagtctccggtttttggagattctggttcgctagtgaattagctagggtagtttttaggataaaacaggactataaacaagaatttgaaaagttgttggtagattgcccaggactttttgaagctcttaatttgggccatcaggttcactttaaagaaaaagttttatcagttttagacttttcaaccccaggtagaactgctgctgctgtggcttttcttacttttatattagataaatggatcccgcagactcatttcagcaggggatacgttttggatttcatagccacagcattgtggagaacatggaaggttcgcaagatgaggacaatcttaggttactggccagtgcagcctttgggtgtagcgggaatcctgaggcatccaccggtcatgccagcggttctggaggaggaacagcaagaggacaacccgagagccggcctggaccctccagtggaggaggcggagtagctgacttgtctcctgaactgcaacgggtgcttactggatctacgtccactggacgggataggggcgttaagagggagagggcatctagtggtactgatgctagatctgagttggctttaagtttaatgagtcgcagacgtcctgaaaccatttggtggcatgaggttcagaaagagggaagggatgaagtttctgtattgcaggagaaatattcactggaacaggtgaaaacatgttggttggagcctgaggatgattgggaggtggccattaaaaattatgccaagatagctttgaggcctgataaacagtataagattactagacggattaatatccggaatgcttgttacatatctggaaatggggctgaggtggtaatagatactcaagacaaggcagttattagatgctgcatgatggatatgtggcctggggtagtcggtatggaagcagtaacttttgtaaatgttaagtttaggggagatggttataatggaatagtgtttatggccaataccaaacttatattgcatggttgtagcttttttggtttcaacaatacctgtgtagatgcctggggacaggttagtgtacggggatgtagtttctatgcgtgttggattgccacagctggcagaaccaagagtcaattgtctctgaagaaatgcatatttcaaagatgtaacctgggcattctgaatgaaggcgaagcaagggtccgccactgcgcttctacagatactggatgttttattttgattaagggaaatgccagcgtaaagcataacatgatttgcggtgcttccgatgagaggccttatcaaatgctcacttgtgctggtgggcattgtaatatgctggctactgtgcatattgtttcccatcaacgcaaaaaatggcctgtttttgatcacaatgtgatgacgaagtgtaccatgcatgcaggtgggcgtagaggaatgtttatgccttaccagtgtaacatgaatcatgtgaaagtgttgttggaaccagatgccttttccagaatgagcctaacaggaatttttgacatgaacatgcaaatctggaagatcctgaggtatgatgatacgagatcgagggtacgcgcatgcgaatgcggaggcaagcatgccaggttccagccggtgtgtgtagatgtgactgaagatctcagaccggatcatttggttattgcccgcactggagcagagttcggatccagtggagaagaaactgactaaggtgagtattgggaaaactttggggtgggattttcagatggacagattgagtaaaaatttgttttttctgtcttgcagctgtcatgagtggaaacgcttcttttaaggggggagtcttcagcccttatctgacagggcgtctcccatcctgggcaggagttcgtcagaatgttatgggatctactgtggatggaagacccgtccaacccgccaattcttcaacgctgacctatgctactttaagttcttcacctttggacgcagctgcagctgccgccgccgcttctgttgccgctaacactgtgcttggaatgggttactatggaagcatcatggctaattccacttcctctaataacccttctaccctgactcaggacaagttacttgtccttttggcccagctggaggctttgacccaacgtctgggtgaactttctcagcaggtggtcgagttgcgagtacaaactgagtctgctgtcggcacggcaaagtctaaataaaaaaatcccagaatcaatgaataaataaacaagcttgttgttgatttaaaatcaagtgtttttatttcatttttcgcgcacggtatgccctagaccaccgatctctatcattgagaactcggtggattttttccaggatcctatagaggtgggattgaatgtttagatacatgggcattaggccgtctttggggtggagatagctccattgaagggattcatgctccggggtagtgttgtaaatcacccagtcataacaaggtcgcagtgcatggtgttgcacaatatcttttagaagtaggctgattgccacagataagcccttggtgtaggtgtttacaaaccggttgagctgggatgggtgcattcggggtgaaattatgtgcattttggattggatttttaagttggcaatattgccgccaagatcccgtcttgggttcatgttatgaaggaccaccaagacggtgtatccggtacatttaggaaatttatcgtgcagcttggatggaaaagcgtggaaaaatttggagacacccttgtgtcctccaagattttccatgcactcatccatgataatagcaatggggccgtgggcagcggcgcgggcaaacacgttccgtgggtctgacacatcatagttatgttcctgagttaaatcatcataagccattttaatgaatttggggcggagagtaccagattggggtatgaatgttccttcgggccccggagcatagttcccctcacagatttgcatttcccaagctttcagttccgagggtggaatcatgtccacctggggggctatgaaaaacaccgtttctggggcgggggtgattaattgtgatgatagcaaatttctgagcaattgagatttgccacatccggtggggccataaatgattccgattacgggttgcaggtggtagtttagggaacggcaactgccgtcttctcgaagcaagggggccacctcgttcatcatttcccttacatgcatattttcccgcaccaaatccattaggaggcgctctcctcctagtgatagaagttcttgtagtgaggaaaagtttttcagcggtttcagaccgtcagccatgggcattttggagagagtttgctgcaaaagttctagtctgttccacagttcagtgatgtgttctatggcatctcgatccagcagacctcctcgtttcgcgggtttggacggctcctggaatagggtatgagacgatgggcgtccagcgctgccagggttcggtccttccagggtctcagtgttcgagtcagggttgtttccgtcacagtgaaggggtgtgcgcctgcttgggcgcttgccagggtgcgcttcagactcatcctgctggtcgaaaacttctgtcgcttggcgccctgtatgtcggccaagtagcagtttaccatgagttcgtagttgagcgcctcggctgcgtggcctttggcgcggagcttacctttggaagttttcttgcataccgggcagtataggcatttcagcgcatacaacttgggcgcaaggaaaacggattctggggagtatgcatctgcgccgcaggaggcgcaaacagtttcacattccaccagccaggttaaatccggttcattggggtcaaaaacaagttttccgccatattttttgatgcgtttcttacctttggtctccatgagttcgtgtcctcgttgagtgacaaacaggctgtccgtgtccccgtagactgattttacaggcctcttctccagtggagtgcctcggtcttcttcgtacaggaactctgaccactctgatacaaaggcgcgcgtccaggccagcacaaaggaggctatgtgggaggggtagcgatcgttgtcaaccagggggtccaccttttccaaagtatgcaaacacatgtcaccctcttcaacatccaggaatgtgattggcttgtaggtgtatttcacgtgacctggggtccccgctgggggggtataaaagggggcggttctttgctcttcctcactgtcttccggatcgctgtccaggaacgtcagctgttggggtaggtattccctctcgaaggcgggcatgacctctgcactcaggttgtcagtttctaagaacgaggaggatttgatattgacagtgccggttgagatgcctttcatgaggttttcgtccatctggtcagaaaacacaatttttttattgtcaagtttggtggcaaatgatccatacagggcgttggataaaagtttggcaatggatcgcatggtttggttcttttccttgtccgcgcgctctttggcggcgatgttgagttggacatactcgcgtgccaggcacttccattcggggaagatagttgttaattcatctggcacgattctcacttgccaccctcgattatgcaaggtaattaaatccacactggtggccacctcgcctcgaaggggttcattggtccaacagagcctacctcctttcctagaacagaaagggggaagtgggtctagcataagttcatcgggagggtctgcatccatggtaaagattcccggaagtaaatccttatcaaaatagctgatgggagtggggtcatctaaggccatttgccattctcgagctgccagtgcgcgctcatatgggttaaggggactgccccatggcatgggatgggtgagtgcagaggcatacatgccacagatgtcatagacgtagatgggatcctcaaagatgcctatgtaggttggatagcatcgcccccctctgatacttgctcgcacatagtcatatagttcatgtgatggcgctagcagccccggacccaagttggtgcgattgggtttttctgttctgtagacgatctggcgaaagatggcgtgagaattggaagagatggtgggtctttgaaaaatgttgaaatgggcatgaggtagacctacagagtctctgacaaagtgggcataagattcttgaagcttggttaccagttcggcggtgacaagtacgtctagggcgcagtagtcaagtgtttcttgaatgatgtcataacctggttggtttttcttttcccacagttcgcggttgagaaggtattcttcgcgatccttccagtactcttctagcggaaacccgtctttgtctgcacggtaagatcctagcatgtagaactgattaactgccttgtaagggcagcagcccttctctacgggtagagagtatgcttgagcagcttttcgtagcgaagcgtgagtaagggcaaaggtgtctctgaccatgactttgaggaattggtatttgaagtcgatgtcgtcacaggctccctgttcccagagttggaagtctacccgtttcttgtaggcggggttgggcaaagcgaaagtaacatcattgaagagaatcttgccggccctgggcatgaaattgcgagtgatgcgaaaaggctgtggtacttccgctcggttattgataacctgggcagctaggacgatctcgtcgaaaccgttgatgttgtgtcctacgatgtataattctatgaaacgcggcgtgcctctgacgtgaggtagcttactgagctcatcaaaggttaggtctgtggggtcagataaggcgtagtgttcgagagcccattcgtgcaggtgaggattcgctttaaggaaggaggaccagaggtccactgccagtgctgtttgtaactggtcccggtactgacgaaaatgccgtccgactgccattttttctggggtgacgcaatagaaggtttgggggtcctgccgccagcgatcccacttgagttttatggcgaggtcataggcgatgttgacgagccgctggtctccagagagtttcatgaccagcatgaaggggattagctgcttgccaaaggaccccatccaggtgtaggtttccacatcgtaggtgagaaagagcctttctgtgcgaggatgagagccaatcgggaagaactggatctcctgccaccagttggaggaatggctgttgatgtgatggaagtagaactccctgcgacgcgccgagcattcatgcttgtgcttgtacagacggccgcagtagtcgcagcgttgcacgggttgtatctcgtgaatgagttgtacctggcttcccttgacgagaaatttcagtgggaagccgaggcctggcgattgtatctcgtgctttactatgttgtctgcatcggcctgttcatcttctgtctcgatggtggtcatgctgacgagccctcgcgggaggcaagtccagacctcggcgcggcaggggcggagctcgaggacgagagcgcgcaggctggagctgtccagggtcctgagacgctgcggactcaggttagtaggcagtgtcaggagattaacttgcatgatcttttggagggcgtgcgggaggttcagatagtacttgatctcaacgggtccgttggtggagatgtcgatggcttgcagggttccgtgtcccttgggcgctaccaccgtgcccttgtttttcattttggacggcggtggctctgttgcttcttgcatgtttagaagcggtgtcgagggcgcgcaccgggcggcaggggcggctcgggacccggcggcatggctggcagtggtacgtcggcgccgcgcgcgggtaggttctggtactgcgccctgagaagactcgcatgcgcgacgacgcggcggttgacatcctggatctgacgcctctgggtgaaagctaccggccccgtgagcttgaacctgaaagagagttcaacagaatcaatctcggtatcgttgacggcggcttgcctaaggatttcttgcacgtcaccagagttgtcctggtaggcgatctccgccatgaactgctcgatctcttcctcttgaagatctccgcggcccgctctctcgacggtggccgcgaggtcgttggagatgcgcccaatgagttgagagaatgcattcatgcccgcctcgttccagacgcggctgtagaccacggcccccacgggatctctcgcgcgcatgaccacctgggcgaggttgagctccacgtggcgggtgaagaccgcatagttgcataggcgctggaaaaggtagttgagtgtggtggcgatgtgctcggtgacgaagaaatacatgatccatcgtctcagcggcatctcgctgacatcgcccagagcttccaagcgctccatggcctcgtagaagtccacggcaaaattaaaaaactgggagtttcgcgcggacacggtcaactcctcttccagaagacggataagttcggcgatggtggtgcgcacctcgcgctcgaaagcccctgggatttcttcctcaatctcttcttcttccactaacatctcttcctcttcaggtggggctgcaggaggagggggaacgcggcgacgccggcggcgcacgggcagacggtcgatgaatctttcaatgacctctccgcggcggcggcgcatggtttcagtgacggcgcggccgttctcgcgcggtcgcagagtaaaaacaccgccgcgcatctccttaaagtggtgactgggaggttctccgtttgggagggagagggcgctgattatacattttattaattggcccgtagggactgcacgcagagatctgatcgtgtcaagatccacgggatctgaaaacctttcgacgaaagcgtctaaccagtcacagtcacaaggtaggctgagtacggcttcttgtgggcgggggtggttatgtgttcggtctgggtcttctgtttcttcttcatctcgggaaggtgagacgatgctgctggtgatgaaattaaagtaggcagttctaagacggcggatggtggcgaggagcaccaggtctttgggtccggcttgctggatacgcaggcgattggccattccccaagcattatcctgacatctagcaagatctttgtagtagtcttgcatgagccgttctacgggcacttcttcctcacccgttctgccatgcatacgtgtgagtccaaatccgcgcattggttgtaccagtgccaagtcagctacgactctttcggcgaggatggcttgctgtacttgggtaagggtggcttgaaagtcatcaaaatccacaaagcggtggtaagctcctgtattaatggtgtaagcacagttggccatgactgaccagttaactgtctggtgaccagggcgcacgagctcggtgtatttaaggcgcgaataggcgcgggtgtcaaagatgtaatcgttgcaggtgcgcaccagatactggtaccctataagaaaatgcggcggtggttggcggtagagaggccatcgttctgtagctggagcgccaggggcgaggtcttccaacataaggcggtgatagccgtagatgtacctggacatccaggtgattcctgcggcggtagtagaagcccgaggaaactcgcgtacgcggttccaaatgttgcgtagcggcatgaagtagttcattgtaggcacggtttgaccagtgaggcgcgcgcagtcattgatgctctatagacacggagaaaatgaaagcgttcagcgactcgactccgtagcctggaggaacgtgaacgggttgggtcgcggtgtaccccggttcgagacttgtactcgagccggccggagccgcggctaacgtggtattggcactcccgtctcgacccagcctacaaaaatccaggatacggaatcgagtcgttttgctggtttccgaatggcagggaagtgagtcctattttttttttttgccgctcagatgcatcccgtgctgcgacagatgcgcccccaacaacagcccccctcgcagcagcagcagcagcaatcacaaaaggctgtccctgcaactactgcaactgccgccgtgagcggtgcgggacagcccgcctatgatctggacttggaagagggcgaaggactggcacgtctaggtgcgccttcacccgagcggcatccgcgagttcaactgaaaaaagattctcgcgaggcgtatgtgccccaacagaacctatttagagacagaagcggcgaggagccggaggagatgcgagcttcccgctttaacgcgggtcgtgagctgcgtcacggtttggaccgaagacgagtgttgcgggacgaggatttcgaagttgatgaaatgacagggatcagtcctgccagggcacacgtggctgcagccaaccttgtatcggcttacgagcagacagtaaaggaagagcgtaacttccaaaagtcttttaataatcatgtgcgaaccctgattgcccgcgaagaagttacccttggtttgatgcatttgtgggatttgatggaagctatcattcagaaccctactagcaaacctctgaccgcccagctgtttctggtggtgcaacacagcagagacaatgaggctttcagagaggcgctgctgaacatcaccgaacccgaggggagatggttgtatgatcttatcaacattctacagagtatcatagtgcaggagcggagcctgggcctggccgagaaggtggctgccatcaattactcggttttgagcttgggaaaatattacgctcgcaaaatctacaagactccatacgttcccatagacaaggaggtgaagatagatgggttctacatgcgcatgacgctcaaggtcttgaccctgagcgatgatcttggggtgtatcgcaatgacagaatgcatcgcgcggttagcgccagcaggaggcgcgagttaagcgacagggaactgatgcacagtttgcaaagagctctgactggagctggaaccgagggtgagaattacttcgacatgggagctgacttgcagtggcagcctagtcgcagggctctgagcgccgcgacggcaggatgtgagcttccttacatagaagaggcggatgaaggcgaggaggaagagggcgagtacttggaagactgatggcacaacccgtgttttttgctagatggaacagcaagcaccggatcccgcaatgcgggcggcgctgcagagccagccgtccggcattaactcctcggacgattggacccaggccatgcaacgtatcatggcgttgacgactcgcaaccccgaagcctttagacagcaaccccaggccaaccgtctatcggccatcatggaagctgtagtgccttcccgctctaatcccactcatgagaaggtcctggccatcgtgaacgcgttggtggagaacaaagctattcgtccagatgaggccggactggtatacaacgctctcttagaacgcgtggctcgctacaacagtagcaatgtgcaaaccaatttggaccgtatgataacagatgtacgcgaagccgtgtctcagcgcgaaaggttccagcgtgatgccaacctgggttcgctggtggcgttaaatgctttcttgagtactcagcctgctaatgtgccgcgtggtcaacaggattatactaactttttaagtgctttgagactgatggtatcagaagtacctcagagcgaagtgtatcagtccggtcctgattacttctttcagactagcagacagggcttgcagacggtaaatctgagccaagcttttaaaaaccttaaaggtttgtggggagtgcatgccccggtaggagaaagagcaaccgtgtctagcttgttaactccgaactcccgcctattattactgttggtagctcctttcaccgacagcggtagcatcgaccgtaattcctatttgggttacctactaaacctgtatcgcgaagccatagggcaaagtcaggtggacgagcagacctatcaagaaattacccaagtcagtcgcgctttgggacaggaagacactggcagtttggaagccactctgaacttcttgcttaccaatcggtctcaaaagatccctcctcaatatgctcttactgcggaggaggagaggatccttagatatgtgcagcagagcgtgggattgtttctgatgcaagagggggcaactccgactgcagcactggacatgacagcgcgaaatatggagcccagcatgtatgccagtaaccgacctttcattaacaaactgctggactacttgcacagagctgccgctatgaactctgattatttcaccaatgccatcttaaacccgcactggctgcccccacctggtttctacacgggcgaatatgacatgcccgaccctaatgacggatttctgtgggacgacgtggacagcgatgttttttcacctctttctgatcatcgcacgtggaaaaaggaaggcggcgatagaatgcattcttctgcatcgctgtccggggtcatgggtgctaccgcggctgagcccgagtctgcaagtccttttcctagtctacccttttctctacacagtgtacgtagcagcgaagtgggtagaataagtcgcccgagtttaatgggcgaagaggagtatctaaacgattccttgctcagaccggcaagagaaaaaaatttcccaaacaatggaatagaaagtttggtggataaaatgagtagatggaagacttatgctcaggatcacagagacgagcctgggatcatggggattacaagtagagcgagccgtagacgccagcgccatgacagacagaggggtcttgtgtgggacgatgaggattcggccgatgatagcagcgtgctggacttgggtgggagaggaaggggcaacccgtttgctcatttgcgccctcgcttgggtggtatgttgtaaaaaaaaataaaaaaaaaactcaccaaggccatggcgacgagcgtacgttcgttcttctttattatctgtgtctagtataatgaggcgagtcgtgctaggcggagcggtggtgtatccggagggtcctcctccttcgtacgagagcgtgatgcagcagcagcaggcgacggcggtgatgcaatccccactggaggctccctttgtgcctccgcgatacctggcacctacggagggcagaaacagcattcgttattcggaactggcacctcagtacgataccaccaggttgtatctggtggacaacaagtcggcggacattgcttctctgaactatcagaatgaccacagcaacttcttgaccacggtggtgcaaaacaatgactttacccctacggaagccagcacccagaccattaactttgatgaacgatcgcggtggggcggtcagctaaagaccatcatgcatactaacatgccaaacgtgaacgagtatatgtttagtaacaagttcaaagcgcgtgtgatggtgtccagaaaacctcccgacggtgctgcagttggggatacttatgatcacaagcaggatattttgaaatatgagtggttcgagtttactttgccagaaggcaacttttcagttactatgactattgatttgatgaacaatgccatcatagataattacttgaaagtgggtagacagaatggagtgcttgaaagtgacattggtgttaagttcgacaccaggaacttcaagctgggatgggatcccgaaaccaagttgatcatgcctggagtgtatacgtatgaagccttccatcctgacattgtcttactgcctggctgcggagtggattttaccgagagtcgtttgagcaaccttcttggtatcagaaaaaaacagccatttcaagagggttttaagattttgtatgaagatttagaaggtggtaatattccggccctcttggatgtagatgcctatgagaacagtaagaaagaacaaaaagccaaaatagaagctgctacagctgctgcagaagctaaggcaaacatagttgccagcgactctacaagggttgctaacgctggagaggtcagaggagacaattttgcgccaacacctgttccgactgcagaatcattattggccgatgtgtctgaaggaacggacgtgaaactcactattcaacctgtagaaaaagatagtaagaatagaagctataatgtgttggaagacaaaatcaacacagcctatcgcagttggtatctttcgtacaattatggcgatcccgaaaaaggagtgcgttcctggacattgctcaccacctcagatgtcacctgcggagcagagcaggtctactggtcgcttccagacatgatgaaggatcctgtcactttccgctccactagacaagtcagtaactaccctgtggtgggtgcagagcttatgcccgtcttctcaaagagcttctacaacgaacaagctgtgtactcccagcagctccgccagtccacctcgcttacgcacgtcttcaaccgctttcctgagaaccagattttaatccgtccgccggcgcccaccattaccaccgtcagtgaaaacgttcctgctctcacagatcacgggaccctgccgttgcgcagcagtatccggggagtccaacgtgtgaccgttactgacgccagacgccgcacctgtccctacgtgtacaaggcactgggcatagtcgcaccgcgcgtcctttcaagccgcactttctaaaaaaaaaaaaaatgtccattcttatctcgcccagtaataacaccggttggggtctgcgcgctccaagcaagatgtacggaggcgcacgcaaacgttctacccaacatcctgtccgtgttcgcggacattttcgcgctccatggggcgccctcaagggccgcactcgcgttcgaaccaccgtcgatgatgtaatcgatcaggtggttgccgacgcccgtaattatactcctactgcgcctacatctactgtggatgcagttattgacagtgtagtggctgacgctcgcaactatgctcgacgtaagagccggcgaaggcgcattgccagacgccaccgagctaccactgccatgcgagccgcaagagctctgctacgaagagctagacgcgtggggcgaagagccatgcttagggcggccagacgtgcagcttcgggcgccagcgccggcaggtcccgcaggcaagcagccgctgtcgcagcggcgactattgccgacatggcccaatcgcgaagaggcaatgtatactgggtgcgtgacgctgccaccggtcaacgtgtacccgtgcgcacccgtccccctcgcacttagaagatactgagcagtctccgatgttgtgtcccagcggcgaggatgtccaagcgcaaatacaaggaagaaatgctgcaggttatcgcacctgaagtctacggccaaccgttgaaggatgaaaaaaaaccccgcaaaatcaagcgggttaaaaaggacaaaaaagaagaggaagatggcgatgatgggctggcggagtttgtgcgcgagtttgccccacggcgacgcgtgcaatggcgtgggcgcaaagttcgacatgtgttgagacctggaacttcggtggtctttacacccggcgagcgttcaagcgctacttttaagcgttcctatgatgaggtgtacggggatgatgatattcttgagcaggcggctgaccgattaggcgagtttgcttatggcaagcgtagtagaataacttccaaggatgagacagtgtcgatacccttggatcatggaaatcccacccctagtcttaaaccggtcactttgcagcaagtgttacccgtaactccgcgaacaggtgttaaacgcgaaggtgaagatttgtatcccactatgcaactgatggtacccaaacgccagaagttggaggacgttttggagaaagtaaaagtggatccagatattcaacctgaggttaaagtgagacccattaagcaggtagcgcctggtctgggggtacaaactgtagacattaagattcccactgaaagtatggaagtgcaaactgaacccgcaaagcctactgccacctccactgaagtgcaaacggatccatggatgcccatgcctattacaactgacgccgccggtcccactcgaagatcccgacgaaagtacggtccagcaagtctgttgatgcccaattatgttgtacacccatctattattcctactcctggttaccgaggcactcgctactatcgcagccgaaacagtacctcccgccgtcgccgcaagacacctgcaaatcgcagtcgtcgccgtagacgcacaagcaaaccgactcccggcgccctggtgcggcaagtgtaccgcaatggtagtgcggaacctttgacactgccgcgtgcgcgttaccatccgagtatcatcacttaatcaatgttgccgctgcctccttgcagatatggccctcacttgtcgccttcgcgttcccatcactggttaccgaggaagaaactcgcgccgtagaagagggatgttgggacgcggaatgcgacgctacaggcgacggcgtgctatccgcaagcaattgcggggtggttttttaccagccttaattccaattatcgctgctgcaattggcgcgataccaggcatagcttccgtggcggttcaggcctcgcaacgacattgacattggaaaaaaacgtataaataaaaaaaaaaaaatacaatggactctgacactcctggtcctgtgactatgttttcttagagatggaagacatcaatttttcatccttggctccgcgacacggcacgaagccgtacatgggcacctggagcgacatcggcacgagccaactgaacgggggcgccttcaattggagcagtatctggagcgggcttaaaaattttggctcaaccataaaaacatacgggaacaaagcttggaacagcagtacaggacaggcgcttagaaataaacttaaagaccagaacttccaacaaaaagtagtcgatgggatagcttccggcatcaatggagtggtagatttggctaaccaggctgtgcagaaaaagataaacagtcgtttggacccgccgccagcaaccccaggtgaaatgcaagtggaggaagaaattcctccgccagaaaaacgaggcgacaagcgtccgcgtcccgatttggaagagacgctggtgacgcgcgtagatgaaccgccttcttatgaggaagcaacgaagcttggaatgcccaccactagaccgatagccccaatggccaccggggtgatgaaaccttctcagttgcatcgacccgtcaccttggatttgccccctccccctgctgctactgctgtacccgcttctaagcctgtcgctgccccgaaaccagtcgccgtagccaggtcacgtcccgggggcgctcctcgtccaaatgcgcactggcaaaatactctgaacagcatcgtgggtctaggcgtgcaaagtgtaaaacgccgtcgctgcttttaattaaatatggagtagcgcttaacttgcctatctgtgtatatgtgtcattacacgccgtcacagcagcagaggaaaaaaggaagaggtcgtgcgtcgacgctgagttactttcaagatggccaccccatcgatgctgccccaatgggcatacatgcacatcgccggacaggatgcttcggagtacctgagtccgggtctggtgcagttcgcccgcgccacagacacctacttcaatctgggaaataagtttagaaatcccaccgtagcgccgacccacgatgtgaccaccgaccgtagccagcggctcatgttgcgcttcgtgcccgttgaccgggaggacaatacatactcttacaaagtgcggtacaccctggccgtgggcgacaacagagtgctggatatggccagcacgttctttgacattaggggtgtgttggacagaggtcccagtttcaaaccctattctggtacggcttacaactccctggctcctaaaggcgctccaaatacatctcagtggattgcagaaggtgtaaaaaatacaactggtgaggaacacgtaacagaagaggaaaccaatactactacttacacttttggcaatgctcctgtaaaagctgaagctgaaattacaaaagaaggactcccagtaggtttggaagtttcagatgaagaaagtaaaccgatttatgctgataaaacatatcagccagaacctcagctgggagatgaaacttggactgaccttgatggaaaaaccgaaaagtatggaggcagggctctcaaacccgatactaagatgaaaccatgctacgggtcctttgccaaacctactaatgtgaaaggcggtcaggcaaaacaaaaaacaacggagcagccaaatcagaaagtcgaatatgatatcgacatggagttttttgatgcggcatcgcagaaaacaaacttaagtcctaaaattgtcatgtatgcagaaaatgtaaatttggaaactccagacactcatgtagtgtacaaacctggaacagaagacacaagttccgaagctaatttgggacaacaatctatgcccaacagacccaactacattggcttcagagataactttattggacttatgtactataacagtactggtaacatgggggtgctggctggtcaagcgtctcagttaaatgcagtggttgacttgcaggacagaaacacagaactttcttaccaactcttgcttgactctctgggcgacagaaccagatactttagcatgtggaatcaggctgtggacagttatgatcctgatgtacgtgttattgaaaatcatggtgtggaagatgaacttcccaactactgttttccactggacggcataggtgttccaacaaccagttacaaatcaatagttccaaatggagacaatgcgcctaattggaaggaacctgaagtaaatggaacaagtgagatcggacagggtaatttgtttgccatggaaattaaccttcaagccaatctatggcgaagtttcctttattccaatgtggctctatatctcccagactcgtacaaatacaccccgtccaatgtcactcttccagaaaacaaaaacacctacgactacatgaacgggcgggtggtgccgccatctctagtagacacctatgtgaacattggtgccaggtggtctctggatgccatggacaatgtcaacccattcaaccaccaccgtaacgctggcttgcgttaccgatccatgcttctgggtaacggacgttatgtgcctttccacatacaagtgcctcaaaaattcttcgctgttaaaaacctgctgcttctcccaggctcctacacttatgagtggaactttaggaaggatgtgaacatggttctacagagttccctcggtaacgacctgcgggtagatggcgccagcatcagtttcacgagcatcaacctctatgctacttttttccccatggctcacaacaccgcttccacccttgaagccatgctgcggaatgacaccaatgatcagtcattcaacgactacctatctgcagctaacatgctctaccccattcctgccaatgcaaccaatattcccatttccattccttctcgcaactgggcggctttcagaggctggtcatttaccagactgaaaaccaaagaaactccctctttggggtctggatttgacccctactttgtctattctggttctattccctacctggatggtaccttctacctgaaccacacttttaagaaggtttccatcatgtttgactcttcagtgagctggcctggaaatgacaggttactatctcctaacgaatttgaaataaagcgcactgtggatggcgaaggctacaacgtagcccaatgcaacatgaccaaagactggttcttggtacagatgctcgccaactacaacatcggctatcagggcttctacattccagaaggatacaaagatcgcatgtattcatttttcagaaacttccagcccatgagcaggcaggtggttgatgaggtcaattacaaagacttcaaggccgtcgccataccctaccaacacaacaactctggctttgtgggttacatggctccgaccatgcgccaaggtcaaccctatcccgctaactatccctatccactcattggaacaactgccgtaaatagtgttacgcagaaaaagttcttgtgtgacagaaccatgtggcgcataccgttctcgagcaacttcatgtctatgggggcccttacagacttgggacagaatatgctctatgccaactcagctcatgctctggacatgacctttgaggtggatcccatggatgagcccaccctgctttatcttctcttcgaagttttcgacgtggtcagagtgcatcagccacaccgcggcatcatcgaggcagtctacctgcgtacaccgttctcggccggtaacgctaccacgtaagaagcttcttgcttcttgcaaatagcagctgcaaccatggcctgcggatcccaaaacggctccagcgagcaagagctcagagccattgtccaagacctgggttgcggaccctattttttgggaacctacgataagcgcttcccggggttcatggcccccgataagctcgcctgtgccattgtaaatacggccggacgtgagacggggggagagcactggttggctttcggttggaacccacgttctaacacctgctacctttttgatccttttggattctcggatgatcgtctcaaacagatttaccagtttgaatatgagggtctcctgcgccgcagcgctcttgctaccaaggaccgctgtattacgctggaaaaatctacccagaccgtgcagggtccccgttctgccgcctgcggacttttctgctgcatgttccttcacgcctttgtgcactggcctgaccgtcccatggacggaaaccccaccatgaaattgctaactggagtgccaaacaacatgcttcattctcctaaagtccagcccaccctgtgtgacaatcaaaaagcactctaccattttcttaatacccattcgccttattttcgctcccatcgtacacacatcgaaagggccactgcgttcgaccgtatggatgttcaataatgactcatgtaaacaacgtgttcaataaacatcactttatttttttacatgtatcaaggctctgcattacttatttatttacaagtcgaatgggttctgacgagaatcagaatgacccgcaggcagtgatacgttgcggaactgatacttgggttgccacttgaattcgggaatcaccaacttgggaaccggtatatcgggcaggatgtcactccacagctttctggtcagctgcaaagctccaagcaggtcaggagccgaaatcttgaaatcacaattaggaccagtgctttgagcgcgagagttgcggtacaccggattgcagcactgaaacaccatcagcgacggatgtctcacgcttgccagcacggtgggatctgcaatcatgcccacatccagatcttcagcattggcaatgctgaacggggtcatcttgcaggtctgcctacccatggcgggcacccaattaggcttgtggttgcaatcgcagtgcagggggatcagtatcatcttggcctgatcctgtctgattcctggatacacggctctcatgaaagcatcatattgcttgaaagcctgctgggctttactaccctcggtataaaacatcccgcaggacctgctcgaaaactggttagctgcacagccggcatcattcacacagcagcgggcgtcattgttagctatttgcaccacacttctgccccagcggttttgggtgattttggttcgctcgggattctcctttaaggctcgttgtccgttctcgctggccacatccatctcgataatctgctccttctgaatcataatattgccatgcaggcacttcagcttgccctcataatcattgcagccatgaggccacaacgcacagcctgtacattcccaattatggtgggcgatctgagaaaaagaatgtatcattccctgcagaaatcttcccatcatcgtgctcagtgtcttgtgactagtgaaagttaactggatgcctcggtgctcctcgtttacgtactggtgacagatgcgcttgtattgttcgtgttgctcaggcattagtttaaaagaggttctaagttcgttatccagcctgtacttctccatcagcagacacatcacttccatgcctttctcccaagcagacaccaggggcaagctaatcggattcttaacagtgcaggcagcagctcctttagccagagggtcatctttagcgatcttctcaatgcttcttttgccatccttctcaacgatgcgcacgggcgggtagctgaaacccactgctacaagttgcgcctcttctctttcttcttcgctgtcttgactgatgtcttgcatggggatatgtttggtcttccttggcttctttttggggggtatcggaggaggaggactgtcgctccgttccggagacagggaggattgtgacgtttcgctcaccattaccaactgactgtcggtagaagaacctgaccccacacggcgacaggtgtttctcttcgggggcagaggtggaggcgattgcgaagggctgcggtccgacctggaaggcggatgactggcagaaccccttccgcgttcgggggtgtgctccctgtggcggtcgcttaactgatttccttcgcggctggccattgtgttctcctaggcagagaaacaacagacatggaaactcagccattgctgtcaacatcgccacgagtgccatcacatctcgtcctcagcgacgaggaaaaggagcagagcttaagcattccaccgcccagtcctgccaccacctctaccctagaagataaggaggtcgacgcatctcatgacatgcagaataaaaaagcgaaagagtctgagacagacatcgagcaagacccgggctatgtgacaccggtggaacacgaggaagagttgaaacgctttctagagagagaggatgaaaactgcccaaaacaacgagcagataactatcaccaagatgctggaaatagggatcagaacaccgactacctcatagggcttgacggggaagacgcgctccttaaacatctagcaagacagtcgctcatagtcaaggatgcattattggacagaactgaagtgcccatcagtgtggaagagctcagccgcgcctacgagcttaacctcttttcacctcgtactccccccaaacgtcagccaaacggcacctgcgagccaaatcctcgcttaaacttttatccagcttttgctgtgccagaagtactggctacctatcacatcttttttaaaaatcaaaaaattccagtctcctgccgcgctaatcgcacccgcgccgatgccctactcaatctgggacctggttcacgcttacctgatatagcttccttggaagaggttccaaagatcttcgagggtctgggcaataatgagactcgggccgcaaatgctctgcaaaagggagaaaatggcatggatgagcatcacagcgttctggtggaattggaaggcgataatgccagactcgcagtactcaagcgaagcatcgaggtcacacacttcgcatatcccgctgtcaacctgccccctaaagtcatgacggcggtcatggaccagttactcattaagcgcgcaagtcccctttcagaagacatgcatgacccagatgcctgtgatgagggtaaaccagtggtcagtgatgagcagctaacccgatggctgggcaccgactctcccagggatttggaagagcgtcgcaagcttatgatggccgtggtgctggttaccgtagaactagagtgtctccgacgtttctttaccgattcagaaaccttgcgcaaactcgaagagaatctgcactacacttttagacacggctttgtgcggcaggcatgcaagatatctaacgtggaactcaccaacctggtttcctacatgggtattctgcatgagaatcgcctaggacaaagcgtgctgcacagcaccctgaagggggaagcccgccgtgattacatccgcgattgtgtctatctgtacctgtgccacacgtggcaaaccggcatgggtgtatggcagcaatgtttagaagaacagaacttgaaagagcttgacaagctcttacagaaatctcttaaggttctgtggacagggttcgacgagcgcaccgtcgcttccgacctggcagacctcatcttcccagagcgtctcagggttactttgcgaaacggattgcctgactttatgagccagagcatgcttaacaattttcgctctttcatcctggaacgctccggtatcctgcccgccacctgctgcgcactgccctccgactttgtgcctctcacctaccgcgagtgccccccgccgctatggagtcactgctacctgttccgtctggccaactatctctcctaccactcggatgtgatcgaggatgtgagcggagacggcttgctggagtgtcactgccgctgcaatctgtgcacgccccaccggtccctagcttgcaacccccagttgatgagcgaaacccagataataggcacctttgaattgcaaggccccagcagccaaggcgatgggtcttctcctgggcaaagtttaaaactgaccccgggactgtggacctccgcctacttgcgcaagtttgctccggaagattaccacccctatgaaatcaagttctatgaggaccaatcacagcctccaaaggccgaactttcggcctgcgtcatcacccagggggcaattctggcccaattgcaagccatccaaaaatcccgccaagaatttctactgaaaaagggtaagggggtctaccttgacccccagaccggcgaggaactcaacacaaggttccctcaggatgtcccaacgacgagaaaacaagaagttgaaggtgcagccgccgcccccagaagatatggaggaagattgggacagtcaggcagaggaggcggaggaggacagtctggaggacagtctggaggaagacagtttggaggaggaaaacgaggaggcagaggaggtggaagaagtaaccgccgacaaacagttatcctcggctgcggagacaagcaacagcgctaccatctccgctccgagtcgaggaacccggcggcgtcccagcagtagatgggacgagaccggacgcttcccgaacccaaccagcgcttccaagaccggtaagaaggatcggcagggatacaagtcctggcgggggcataagaatgccatcatctcctgcttgcatgagtgcgggggcaacatatccttcacgcggcgctacttgctattccaccatggggtgaactttccgcgcaatgttttgcattactaccgtcacctccacagcccctactatagccagcaaatcccggcagtctcgacagataaagacagcggcggcgacctccaacagaaaaccagcagcggcagttagaaaatacacaacaagtgcagcaacaggaggattaaagattacagccaacgagccagcgcaaacccgagagttaagaaatcggatctttccaaccctgtatgccatcttccagcagagtcggggtcaagagcaggaactgaaaataaaaaaccgatctctgcgttcgctcaccagaagttgtttgtatcacaagagcgaagatcaacttcagcgcactctcgaggacgccgaggctctcttcaacaagtactgcgcgctgactcttaaagagtaggcagcgaccgcgcttattcaaaaaaggcgggaattacatcatcctcgacatgagtaaagaaattcccacgccttacatgtggagttatcaaccccaaatgggattggcggcaggcgcctcccaggactactccacccgcatgaattggctcagcgccgggccttctatgatttctcgagttaatgatatacgcgcctaccgaaaccaaatacttttggaacagtcagctcttaccaccacgccccgccaacaccttaatcccagaaattggcccgccgccctagtgtaccaggaaagtcccgctcccaccactgtattacttcctcgagacgcccaggccgaagtccaaatgactaatgcaggtgcgcagttagctggcggctccaccctatgtcgtcacaggcctcggcataatataaaacgcctgatgatcagaggccgaggtatccagctcaacgacgagtcggtgagctctccgcttggtctacgaccagacggaatctttcagattgccggctgcgggagatcttccttcacccctcgtcaggctgttctgactttggaaagttcgtcttcgcaaccccgctcgggcggaatcgggaccgttcaatttgtggaggagtttactccctctgtctacttcaaccccttctccggatctcctgggcattacccggacgagttcataccgaacttcgacgcgattagcgagtcagtggacggctacgattgatgtctggtgacgcggctgagctatctcggctgcgacatctagaccactgccgccgctttcgctgctttgcccgggaactcattgagttcatctacttcgaactccccaaggatcaccctcaaggtccggcccacggagtgcggatttctatcgaaggcaaaatagactctcgcctgcaacgaattttctcccagcggcccgtgctgatcgagcgagaccagggaaacaccacggtttccatctactgcatttgtaatcaccccggattgcatgaaagcctttgctgtcttatgtgtactgagtttaataaaaactgaattaagactctcctacggactgccgcttcttcaacccggattttacaaccagaagaacgaaacttttcctgtcgtccaggactctgttaacttcacctttcctactcacaaactagaagctcaacgactacaccgcttttccagaagcattttccctactaatactactttcaaaaccggaggtgagctccaaggtcttcctacagaaaacccttgggtggaagcgggccttgtagtgctaggaattcttgcgggtgggcttgtgattattctttgctacctatacacaccttgcttcactttcttagtggtgttgtggtattggtttaaaaaatggggcccatactagtcttgcttgttttactttcgcttttggaaccgggttctgccaattacgatccatgtctagacttcgacccagaaaactgcacacttacttttgcacccgacacaagccgcatctgtggagttcatcgcctctcttacgaacttggcccccaacgacaaaaatttacctgcatggtgggaatcaaccccatagttatcacccagcaaagtggagatactaagggttgcattcactgctcctgcgattccatcgagtgcacctacaccctgctgaagaccctatgcggcctaagagacctgctaccaatgaattaaaaaatgattaataaaaaatcacttacttgaaatcagcaataaggtctctgttgaaattttctcccagcagcacctcacttccctcttcccaactctggtattctaaaccccgttcagcggcatactttctccatactttaaaggggatgtcaaattttagctcctctcctgtacccacaatcttcatgtctttcttcccagatgaccaagagagtccggctcagtgactccttcaaccctgtctacccctatgaagatgaaagcacctcccaacacccctttataaacccagggtttatttccccaaatggcttcacacaaagcccaaacggagttcttactttaaaatgtttaaccccactaacaaccacaggcggatctctacagctaaaagtgggagggggacttacagtggatgacaccaacggttttttgaaagaaaacataagtgccaccacaccactcgttaagactggtcactctataggtttaccactaggagccggattgggaacgaatgaaaataaactttgtatcaaattaggacaaggacttacattcaattcaaacaacatttgcattgatgacaatattaacaccttatggacaggagtcaaccccaccgaagccaactgtcaaatcatgaactccagtgaatctaatgattgcaaattaattctaacactagttaaaactggagcactagtcactgcatttgtttatgttataggagtatctaacaattttaatatgctaactacacacagaaatataaattttactgcagagctgtttttcgattctactggtaatttactaactagactctcatccctcaaaactccacttaatcataaatcaggacaaaacatggctactggtgccattactaatgctaaaggtttcatgcccagcacgactgcctatcctttcaatgataattctagagaaaaagaaaactacatttacggaacttgttactacacagctagtgatcgcactgcttttcccattgacatatctgtcatgcttaaccgaagagcaataaatgacgagacatcatattgtattcgtataacttggtcctggaacacaggagatgccccagaggtgcaaacctctgctacaaccctagtcacctccccatttaccttttactacatcagagaagacgactgacaaataaagtttgcgatcgccaggcccaccatgaagaagagcggagtgctgtttctgctgggaatcattctgctggtgctgattggcgtgcaaggcacacccgtggtcagaaaaggcagatgcagctgcatcagcacaaaccaaggcaccatccatctccagtctctgaaggatctcaagcagtttgcccccagccccagctgcgagaagatcgagatcatcgccacactgaaaaatggcgtgcaaacatgcctcaaccccgactccgccgatgtgaaggagctgattaagaagtgggagaagcaagtgtcccagaaaaagaaacaaaagaatggcaaaaaacatcagaagaagaaggtcctcaaggtgagaaagagccagaggtctagacagaaaaagacaaccggcagcggccagtgcaccaattacgctctgctgaaactggctggagatgtggagagcaaccccggccctatgtgccatcagcagctggtgattagctggttctctctggtgtttctggccagccccctcgtggctatctgggagctcaagaaggacgtgtacgtggtcgagctggattggtatcccgacgcccccggcgagatggtggtgctgacatgtgatacccccgaggaggacggaattacatggacactggaccaaagcagcgaagtgctgggcagcggcaaaacactgaccatccaagtgaaggagtttggcgatgctggacagtacacatgccacaagggcggagaagtgctcagccattctctgctgctgctccataagaaggaggatggaatctggtccaccgacattctgaaggaccaaaaggaacctaagaacaagacctttctgaggtgcgaggccaaaaactattccggaagattcacatgctggtggctgacaacaatcagcaccgacctcacattctccgtgaagagctctagaggcagcagcgatccccaaggcgtcacatgcggagccgccacactgagcgccgaaagggtgagaggcgacaataaggagtacgagtacagcgtcgagtgccaagaggactccgcttgtcccgctgccgaagaatccctccccatcgaagtgatggtggacgccgtgcacaaactgaaatacgaaaattacacatcctcctttttcattagagatatcatcaagcccgacccccccaagaacctccagctgaagcctctgaagaactctagacaagtggaggtgagctgggagtaccccgacacatggtccaccccccatagctacttctccctcaccttttgcgtgcaagtgcaaggcaagagcaagagggagaaaaaggatagagtgtttaccgacaagacctccgctacagtgatctgtagaaagaatgcctccatcagcgtgagagcccaagatagatattattcctccagctggagcgaatgggccagcgtcccttgttccggaggcggaggatccggcggaggaggctccggaggaggcggaagcagaaatctgcccgtggccacacccgatcccggcatgtttccttgcctccatcacagccagaatctgctgagggctgtgagcaacatgctgcaaaaggctagacagacactggagttctatccttgcacaagcgaggagatcgaccacgaagacatcaccaaggacaagaccagcacagtggaggcttgtctgcctctggagctcaccaagaacgagagctgtctgaattctagagaaaccagcttcatcaccaacggcagctgcctcgccagcagaaagacaagcttcatgatggccctctgcctcagcagcatttacgaggacctcaagatgtaccaagtcgagtttaaaaccatgaatgccaagctgctgatggaccccaagaggcagatctttctggaccagaatatgctggccgtgatcgatgagctcatgcaagctctgaacttcaactccgagaccgtgccccaaaagtcctctctggaagaacccgacttctacaagacaaagattaagctctgtattctgctgcacgcctttagaattagagccgtcaccattgatagagtgatgtcctatctcaacgcctccggcagcggagagggaagaggatctctgctgacatgcggagacgtggaggaaaatcccggccccgcccctagaagagctaggggatgtagaacactgggactccccgctctgctgctgctgctcctcctcagacctcccgctacaagaggcatcacatgcccccctcccatgagcgtcgagcacgctgacatttgggtgaaatcctactctctgtactctagagagaggtacatctgcaactccggattcaagagaaaggccggcacatcctctctgacagagtgcgtgctgaacaaggctaccaacgtggcccactggaccacaccttctctgaagtgcatcagagacggctccggcgctaccaacttttctctgctgaagcaagccggagatgtcgaggagaatcccggacccgactggacatggaggattctgtttctggtcgctgccgctaccggcgctcactccaactgggtcaatgtgatctccgatctgaaaaaaatcgaggatctgatccagagcatgcacattgacgccacactgtacaccgagtccgatgtgcaccctagctgtaaagtgaccgccatgaagtgttttctcctcgagctgcaagtgatctccctcgagagcggagatgccagcattcatgacaccgtggagaacctcattattctggccaacaatagcctctccagcaatggaaacgtcaccgaaagcggatgcaaggaatgcgaggagctcgaggagaagaacatcaaggagttcctccagagcttcgtgcatattgtccagatgtttatcaacacatcctgagctagcttgactgactgagatacagcgtaccttcagctcacagacatgataagatacattgatgagtttggacaaaccacaactagaatgcagtgaaaaaaatgctttatttgtgaaatttgtgatgctattgctttatttgtaaccattataagctgcaataaacaagttaacaacaacaattgcattcattttatgtttcaggttcagggggaggtgtgggaggttttttaaagcaagtaaaacctctacaaatgtggtagtcgtcagctatcctgcaggaacttgtttatttgaaaatcaattcacaaaatccgagtagttattttgcctcccccttcccatttaacagaatacaccaatctctccccacgcacagctttaaacatttggataccattagatatagacatggttttagattccacattccaaacagtttcagagcgagccaatctggggtcagtgatagataaaaatccatcgggatagtcttttaaagcgctttcacagtccaactgctgcggatgcgactccggagtctggatcacggtcatctggaagaagaacgatgggaatcataatccgaaaacggtatcggacgattgtgtctcatcaaacccacaagcagccgctgtctgcgtcgctccgtgcgactgctgtttatgggatcagggtccacagtgtcctgaagcatgattttaatagcccttaacatcaactttctggtgcgatgcgcgcagcaacgcattctgatttcactcaaatctttgcagtaggtacaacacattattacaatattgtttaataaaccataattaaaagcgctccagccaaaactcatatctgatataatcgcccctgcatgaccatcataccaaagtttaatataaattaaatgacgttccctcaaaaacacactacccacatacatgatctcttttggcatgtgcatattaacaatctgtctgtaccatggacaacgttggttaatcatgcaacccaatataaccttccggaaccacactgccaacaccgctcccccagccatgcattgaagtgaaccctgctgattacaatgacaatgaagaacccaattctctcgaccgtgaatcacttgagaatgaaaaatatctatagtggcacaacatagacataaatgcatgcatcttctcataatttttaactcctcaggatttagaaacatatcccagggaataggaagctcttgcagaacagtaaagctggcagaacaaggaagaccacgaacacaacttacactatgcatagtcatagtatcacaatctggcaacagcgggtggtcttcagtcatagaagctcgggtttcattttcctcacaacgtggtaactgggctctggtgtaagggtgatgtctggcgcatgatgtcgagcgtgcgcgcaaccttgtcataatggagttgcttcctgacattctcgtattttgtatagcaaaacgcggccctggcagaacacactcttcttcgccttctatcctgccgcttagcgtgttccgtgtgatagttcaagtacaaccacactcttaagttggtcaaaagaatgctggcttcagttgtaatcaaaactccatcgcatctaatcgttctgaggaaatcatccaagcaatgcaactggattgtgtttcaagcaggagaggagagggaagagacggaagaaccatgttaatttttattccaaacgatctcgcagtacttcaaattgtagatcgcgcagatggcatctctcgcccccactgtgttggtgaaaaagcacagctagatcaaaagaaatgcgattttcaaggtgctcaacggtggcttccagcaaagcctccacgcgcacatccaagaacaaaagaataccaaaagaaggagcattttctaactcctcaatcatcatattacattcctgcaccattcccagataattttcagctttccagccttgaattattcgtgtcagttcttgtggtaaatccaatccacacattacaaacaggtcccggagggcgccctccaccaccattcttaaacacaccctcataatgacaaaatatcttgctcctgtgtcacctgtagcgaattgagaatggcaacatcaattgacatgcccttggctctaagttcttctttaagttctagttgtaaaaactctctcatattatcaccaaactgcttagccagaagccccccgggaacaagagcaggggacgctacagtgcagtacaagcgcagacctccccaattggctccagcaaaaacaagattggaataagcatattgggaaccgccagtaatatcatcgaagttgctggaaatataatcaggcagagtttcttgtaaaaattgaataaaagaaaaatttgccaaaaaaacattcaaaacctctgggatgcaaatgcaataggttaccgcgctgcgctccaacattgttagttttgaattagtctgcaaaaataaaaaaaaaaacaagcgtcatatcatagtagcctgacgaacagatggataaatcagtctttccatcacaagacaagccacagggtctccagctcgaccctcgtaaaacctgtcatcatgattaaacaacagcaccgaaagttcctcgcggtgaccagcatgaataattcttgatgaagcatacaatccagacatgttagcatcagttaacgagaaaaaacagccaacatagcctttgggtataattatgcttaatcgtaagtatagcaaagccacccctcgcggatacaaagtaaaaggcacaggagaataaaaaatataattatttctctgctgctgttcaggcaacgtcgcccccggtccctctaaatacacatacaaagcctcatcagccatggcttaccagacaaagtacagcgggcacacaaagcacaagctctaaagtgactctccaacctctccacaatatatatatacacaagccctaaactgacgtaatgggagtaaagtgtaaaaaatcccgccaaacccaacacacaccccgaaactgcgtcaccagggaaaagtacagtttcacttccgcaatcccaacaggcgtaacttcctctttctcacggtacgtgatatcccactaacttgcaacgtcattttcccacggtcgcaccgccccttttagccgttaaccccacagccaatcaccacacgatccacactttttaaaatcacctcatttacatattggcaccattccatctataaggtatattatatagataga

SEQ ID NO: 230 - DNA, 35704 bp, Artificial Sequence
  Genome sequence of NG-795A virus
tctatctatataatataccttatagatggaatggtgccaatatgtaaatgaggtgattttaaaaagtgtggatcgtgtggtgattggctgtggggttaacggctaaaaggggcggtgcgaccgtgggaaaatgacgttttgtgggggtggagtttttttgcaagttgtcgcgggaaatgtgacgcataaaaaggcttttttctcacggaactacttagttttcccacggtatttaacaggaaatgaggtagttttgaccggatgcaagtgaaaattgttgattttcgcgcgaaaactgaatgaggaagtgtttttctgaataatgtggtatttatggcagggtggagtatttgttcagggccaggtagactttgacccattacgtggaggtttcgattaccgtgttttttacctgaatttccgcgtaccgtgtcaaagtcttctgtttttacgtaggtgtcagctgatcgctagggtatttatacctcagggtttgtgtcaagaggccactcttgagtgccagcgagaagagttttctcctctgcgccggcagtttaataataaaaaaatgagagatttgcgatttctgcctcaggaaataatctctgctgagactggaaatgaaatattggagcttgtggtgcacgccctgatgggagacgatccggagccacctgtgcagctttttgagcctcctacgcttcaggaactgtatgatttagaggtagagggatcggaggattctaatgaggaagctgtaaatggcttttttaccgattctatgcttttagctgctaatgaagggttagaattagatccgcctttggacacttttgatactccaggggtaattgtggaaagcggtacaggtgtaagaaaattacctgatttgagttccgtggactgtgatttgcactgctatgaagacgggtttcctccgagtgatgaggaggaccatgaaaaggagcagtccatgcagactgcagcgggtgagggagtgaaggctgccaatgttggttttcagttggattgcccggagcttcctggacatggctgtaagtcttgtgaatttcacaggaaaaatactggagtaaaggaactgttatgttcgctttgttatatgagaacgcactgccactttatttacagtaagtgtgtttaagttaaaatttaaaggaatatgctgtttttcacatgtatattgagtgtgagttttgtgcttcttattataggtcctgtgtctgatgctgatgaatcaccatctcctgattctactacctcacctcctgagattcaagcacctgttcctgtggacgtgcgcaagcccattcctgtgaagcttaagcctgggaaacgtccagcagtggaaaaacttgaggacttgttacagggtggggacggacctttggacttgagtacacggaaacgtccaagacaataagtgttccatatccgtgtttacttaaggtgacgtcaatatttgtgtgacagtgcaatgtaataaaaatatgttaactgttcactggtttttattgctttttgggcggggactcaggtatataagtagaagcagacctgtgtggttagctcataggagctggctttcatccatggaggtttgggccattttggaagaccttaggaagactaggcaactgttagagaacgcttcggacggagtctccggtttttggagattctggttcgctagtgaattagctagggtagtttttaggataaaacaggactataaacaagaatttgaaaagttgttggtagattgcccaggactttttgaagctcttaatttgggccatcaggttcactttaaagaaaaagttttatcagttttagacttttcaaccccaggtagaactgctgctgctgtggcttttcttacttttatattagataaatggatcccgcagactcatttcagcaggggatacgttttggatttcatagccacagcattgtggagaacatggaaggttcgcaagatgaggacaatcttaggttactggccagtgcagcctttgggtgtagcgggaatcctgaggcatccaccggtcatgccagcggttctggaggaggaacagcaagaggacaacccgagagccggcctggaccctccagtggaggaggcggagtagctgacttgtctcctgaactgcaacgggtgcttactggatctacgtccactggacgggataggggcgttaagagggagagggcatctagtggtactgatgctagatctgagttggctttaagtttaatgagtcgcagacgtcctgaaaccatttggtggcatgaggttcagaaagagggaagggatgaagtttctgtattgcaggagaaatattcactggaacaggtgaaaacatgttggttggagcctgaggatgattgggaggtggccattaaaaattatgccaagatagctttgaggcctgataaacagtataagattactagacggattaatatccggaatgcttgttacatatctggaaatggggctgaggtggtaatagatactcaagacaaggcagttattagatgctgcatgatggatatgtggcctggggtagtcggtatggaagcagtaacttttgtaaatgttaagtttaggggagatggttataatggaatagtgtttatggccaataccaaacttatattgcatggttgtagcttttttggtttcaacaatacctgtgtagatgcctggggacaggttagtgtacggggatgtagtttctatgcgtgttggattgccacagctggcagaaccaagagtcaattgtctctgaagaaatgcatatttcaaagatgtaacctgggcattctgaatgaaggcgaagcaagggtccgccactgcgcttctacagatactggatgttttattttgattaagggaaatgccagcgtaaagcataacatgatttgcggtgcttccgatgagaggccttatcaaatgctcacttgtgctggtgggcattgtaatatgctggctactgtgcatattgtttcccatcaacgcaaaaaatggcctgtttttgatcacaatgtgatgacgaagtgtaccatgcatgcaggtgggcgtagaggaatgtttatgccttaccagtgtaacatgaatcatgtgaaagtgttgttggaaccagatgccttttccagaatgagcctaacaggaatttttgacatgaacatgcaaatctggaagatcctgaggtatgatgatacgagatcgagggtacgcgcatgcgaatgcggaggcaagcatgccaggttccagccggtgtgtgtagatgtgactgaagatctcagaccggatcatttggttattgcccgcactggagcagagttcggatccagtggagaagaaactgactaaggtgagtattgggaaaactttggggtgggattttcagatggacagattgagtaaaaatttgttttttctgtcttgcagctgtcatgagtggaaacgcttcttttaaggggggagtcttcagcccttatctgacagggcgtctcccatcctgggcaggagttcgtcagaatgttatgggatctactgtggatggaagacccgtccaacccgccaattcttcaacgctgacctatgctactttaagttcttcacctttggacgcagctgcagctgccgccgccgcttctgttgccgctaacactgtgcttggaatgggttactatggaagcatcatggctaattccacttcctctaataacccttctaccctgactcaggacaagttacttgtccttttggcccagctggaggctttgacccaacgtctgggtgaactttctcagcaggtggtcgagttgcgagtacaaactgagtctgctgtcggcacggcaaagtctaaataaaaaaatcccagaatcaatgaataaataaacaagcttgttgttgatttaaaatcaagtgtttttatttcatttttcgcgcacggtatgccctagaccaccgatctctatcattgagaactcggtggattttttccaggatcctatagaggtgggattgaatgtttagatacatgggcattaggccgtctttggggtggagatagctccattgaagggattcatgctccggggtagtgttgtaaatcacccagtcataacaaggtcgcagtgcatggtgttgcacaatatcttttagaagtaggctgattgccacagataagcccttggtgtaggtgtttacaaaccggttgagctgggatgggtgcattcggggtgaaattatgtgcattttggattggatttttaagttggcaatattgccgccaagatcccgtcttgggttcatgttatgaaggaccaccaagacggtgtatccggtacatttaggaaatttatcgtgcagcttggatggaaaagcgtggaaaaatttggagacacccttgtgtcctccaagattttccatgcactcatccatgataatagcaatggggccgtgggcagcggcgcgggcaaacacgttccgtgggtctgacacatcatagttatgttcctgagttaaatcatcataagccattttaatgaatttggggcggagagtaccagattggggtatgaatgttccttcgggccccggagcatagttcccctcacagatttgcatttcccaagctttcagttccgagggtggaatcatgtccacctggggggctatgaaaaacaccgtttctggggcgggggtgattaattgtgatgatagcaaatttctgagcaattgagatttgccacatccggtggggccataaatgattccgattacgggttgcaggtggtagtttagggaacggcaactgccgtcttctcgaagcaagggggccacctcgttcatcatttcccttacatgcatattttcccgcaccaaatccattaggaggcgctctcctcctagtgatagaagttcttgtagtgaggaaaagtttttcagcggtttcagaccgtcagccatgggcattttggagagagtttgctgcaaaagttctagtctgttccacagttcagtgatgtgttctatggcatctcgatccagcagacctcctcgtttcgcgggtttggacggctcctggaatagggtatgagacgatgggcgtccagcgctgccagggttcggtccttccagggtctcagtgttcgagtcagggttgtttccgtcacagtgaaggggtgtgcgcctgcttgggcgcttgccagggtgcgcttcagactcatcctgctggtcgaaaacttctgtcgcttggcgccctgtatgtcggccaagtagcagtttaccatgagttcgtagttgagcgcctcggctgcgtggcctttggcgcggagcttacctttggaagttttcttgcataccgggcagtataggcatttcagcgcatacaacttgggcgcaaggaaaacggattctggggagtatgcatctgcgccgcaggaggcgcaaacagtttcacattccaccagccaggttaaatccggttcattggggtcaaaaacaagttttccgccatattttttgatgcgtttcttacctttggtctccatgagttcgtgtcctcgttgagtgacaaacaggctgtccgtgtccccgtagactgattttacaggcctcttctccagtggagtgcctcggtcttcttcgtacaggaactctgaccactctgatacaaaggcgcgcgtccaggccagcacaaaggaggctatgtgggaggggtagcgatcgttgtcaaccagggggtccaccttttccaaagtatgcaaacacatgtcaccctcttcaacatccaggaatgtgattggcttgtaggtgtatttcacgtgacctggggtccccgctgggggggtataaaagggggcggttctttgctcttcctcactgtcttccggatcgctgtccaggaacgtcagctgttggggtaggtattccctctcgaaggcgggcatgacctctgcactcaggttgtcagtttctaagaacgaggaggatttgatattgacagtgccggttgagatgcctttcatgaggttttcgtccatctggtcagaaaacacaatttttttattgtcaagtttggtggcaaatgatccatacagggcgttggataaaagtttggcaatggatcgcatggtttggttcttttccttgtccgcgcgctctttggcggcgatgttgagttggacatactcgcgtgccaggcacttccattcggggaagatagttgttaattcatctggcacgattctcacttgccaccctcgattatgcaaggtaattaaatccacactggtggccacctcgcctcgaaggggttcattggtccaacagagcctacctcctttcctagaacagaaagggggaagtgggtctagcataagttcatcgggagggtctgcatccatggtaaagattcccggaagtaaatccttatcaaaatagctgatgggagtggggtcatctaaggccatttgccattctcgagctgccagtgcgcgctcatatgggttaaggggactgccccatggcatgggatgggtgagtgcagaggcatacatgccacagatgtcatagacgtagatgggatcctcaaagatgcctatgtaggttggatagcatcgcccccctctgatacttgctcgcacatagtcatatagttcatgtgatggcgctagcagccccggacccaagttggtgcgattgggtttttctgttctgtagacgatctggcgaaagatggcgtgagaattggaagagatggtgggtctttgaaaaatgttgaaatgggcatgaggtagacctacagagtctctgacaaagtgggcataagattcttgaagcttggttaccagttcggcggtgacaagtacgtctagggcgcagtagtcaagtgtttcttgaatgatgtcataacctggttggtttttcttttcccacagttcgcggttgagaaggtattcttcgcgatccttccagtactcttctagcggaaacccgtctttgtctgcacggtaagatcctagcatgtagaactgattaactgccttgtaagggcagcagcccttctctacgggtagagagtatgcttgagcagcttttcgtagcgaagcgtgagtaagggcaaaggtgtctctgaccatgactttgaggaattggtatttgaagtcgatgtcgtcacaggctccctgttcccagagttggaagtctacccgtttcttgtaggcggggttgggcaaagcgaaagtaacatcattgaagagaatcttgccggccctgggcatgaaattgcgagtgatgcgaaaaggctgtggtacttccgctcggttattgataacctgggcagctaggacgatctcgtcgaaaccgttgatgttgtgtcctacgatgtataattctatgaaacgcggcgtgcctctgacgtgaggtagcttactgagctcatcaaaggttaggtctgtggggtcagataaggcgtagtgttcgagagcccattcgtgcaggtgaggattcgctttaaggaaggaggaccagaggtccactgccagtgctgtttgtaactggtcccggtactgacgaaaatgccgtccgactgccattttttctggggtgacgcaatagaaggtttgggggtcctgccgccagcgatcccacttgagttttatggcgaggtcataggcgatgttgacgagccgctggtctccagagagtttcatgaccagcatgaaggggattagctgcttgccaaaggaccccatccaggtgtaggtttccacatcgtaggtgagaaagagcctttctgtgcgaggatgagagccaatcgggaagaactggatctcctgccaccagttggaggaatggctgttgatgtgatggaagtagaactccctgcgacgcgccgagcattcatgcttgtgcttgtacagacggccgcagtagtcgcagcgttgcacgggttgtatctcgtgaatgagttgtacctggcttcccttgacgagaaatttcagtgggaagccgaggcctggcgattgtatctcgtgctttactatgttgtctgcatcggcctgttcatcttctgtctcgatggtggtcatgctgacgagccctcgcgggaggcaagtccagacctcggcgcggcaggggcggagctcgaggacgagagcgcgcaggctggagctgtccagggtcctgagacgctgcggactcaggttagtaggcagtgtcaggagattaacttgcatgatcttttggagggcgtgcgggaggttcagatagtacttgatctcaacgggtccgttggtggagatgtcgatggcttgcagggttccgtgtcccttgggcgctaccaccgtgcccttgtttttcattttggacggcggtggctctgttgcttcttgcatgtttagaagcggtgtcgagggcgcgcaccgggcggcaggggcggctcgggacccggcggcatggctggcagtggtacgtcggcgccgcgcgcgggtaggttctggtactgcgccctgagaagactcgcatgcgcgacgacgcggcggttgacatcctggatctgacgcctctgggtgaaagctaccggccccgtgagcttgaacctgaaagagagttcaacagaatcaatctcggtatcgttgacggcggcttgcctaaggatttcttgcacgtcaccagagttgtcctggtaggcgatctccgccatgaactgctcgatctcttcctcttgaagatctccgcggcccgctctctcgacggtggccgcgaggtcgttggagatgcgcccaatgagttgagagaatgcattcatgcccgcctcgttccagacgcggctgtagaccacggcccccacgggatctctcgcgcgcatgaccacctgggcgaggttgagctccacgtggcgggtgaagaccgcatagttgcataggcgctggaaaaggtagttgagtgtggtggcgatgtgctcggtgacgaagaaatacatgatccatcgtctcagcggcatctcgctgacatcgcccagagcttccaagcgctccatggcctcgtagaagtccacggcaaaattaaaaaactgggagtttcgcgcggacacggtcaactcctcttccagaagacggataagttcggcgatggtggtgcgcacctcgcgctcgaaagcccctgggatttcttcctcaatctcttcttcttccactaacatctcttcctcttcaggtggggctgcaggaggagggggaacgcggcgacgccggcggcgcacgggcagacggtcgatgaatctttcaatgacctctccgcggcggcggcgcatggtttcagtgacggcgcggccgttctcgcgcggtcgcagagtaaaaacaccgccgcgcatctccttaaagtggtgactgggaggttctccgtttgggagggagagggcgctgattatacattttattaattggcccgtagggactgcacgcagagatctgatcgtgtcaagatccacgggatctgaaaacctttcgacgaaagcgtctaaccagtcacagtcacaaggtaggctgagtacggcttcttgtgggcgggggtggttatgtgttcggtctgggtcttctgtttcttcttcatctcgggaaggtgagacgatgctgctggtgatgaaattaaagtaggcagttctaagacggcggatggtggcgaggagcaccaggtctttgggtccggcttgctggatacgcaggcgattggccattccccaagcattatcctgacatctagcaagatctttgtagtagtcttgcatgagccgttctacgggcacttcttcctcacccgttctgccatgcatacgtgtgagtccaaatccgcgcattggttgtaccagtgccaagtcagctacgactctttcggcgaggatggcttgctgtacttgggtaagggtggcttgaaagtcatcaaaatccacaaagcggtggtaagctcctgtattaatggtgtaagcacagttggccatgactgaccagttaactgtctggtgaccagggcgcacgagctcggtgtatttaaggcgcgaataggcgcgggtgtcaaagatgtaatcgttgcaggtgcgcaccagatactggtaccctataagaaaatgcggcggtggttggcggtagagaggccatcgttctgtagctggagcgccaggggcgaggtcttccaacataaggcggtgatagccgtagatgtacctggacatccaggtgattcctgcggcggtagtagaagcccgaggaaactcgcgtacgcggttccaaatgttgcgtagcggcatgaagtagttcattgtaggcacggtttgaccagtgaggcgcgcgcagtcattgatgctctatagacacggagaaaatgaaagcgttcagcgactcgactccgtagcctggaggaacgtgaacgggttgggtcgcggtgtaccccggttcgagacttgtactcgagccggccggagccgcggctaacgtggtattggcactcccgtctcgacccagcctacaaaaatccaggatacggaatcgagtcgttttgctggtttccgaatggcagggaagtgagtcctattttttttttttgccgctcagatgcatcccgtgctgcgacagatgcgcccccaacaacagcccccctcgcagcagcagcagcagcaatcacaaaaggctgtccctgcaactactgcaactgccgccgtgagcggtgcgggacagcccgcctatgatctggacttggaagagggcgaaggactggcacgtctaggtgcgccttcacccgagcggcatccgcgagttcaactgaaaaaagattctcgcgaggcgtatgtgccccaacagaacctatttagagacagaagcggcgaggagccggaggagatgcgagcttcccgctttaacgcgggtcgtgagctgcgtcacggtttggaccgaagacgagtgttgcgggacgaggatttcgaagttgatgaaatgacagggatcagtcctgccagggcacacgtggctgcagccaaccttgtatcggcttacgagcagacagtaaaggaagagcgtaacttccaaaagtcttttaataatcatgtgcgaaccctgattgcccgcgaagaagttacccttggtttgatgcatttgtgggatttgatggaagctatcattcagaaccctactagcaaacctctgaccgcccagctgtttctggtggtgcaacacagcagagacaatgaggctttcagagaggcgctgctgaacatcaccgaacccgaggggagatggttgtatgatcttatcaacattctacagagtatcatagtgcaggagcggagcctgggcctggccgagaaggtggctgccatcaattactcggttttgagcttgggaaaatattacgctcgcaaaatctacaagactccatacgttcccatagacaaggaggtgaagatagatgggttctacatgcgcatgacgctcaaggtcttgaccctgagcgatgatcttggggtgtatcgcaatgacagaatgcatcgcgcggttagcgccagcaggaggcgcgagttaagcgacagggaactgatgcacagtttgcaaagagctctgactggagctggaaccgagggtgagaattacttcgacatgggagctgacttgcagtggcagcctagtcgcagggctctgagcgccgcgacggcaggatgtgagcttccttacatagaagaggcggatgaaggcgaggaggaagagggcgagtacttggaagactgatggcacaacccgtgttttttgctagatggaacagcaagcaccggatcccgcaatgcgggcggcgctgcagagccagccgtccggcattaactcctcggacgattggacccaggccatgcaacgtatcatggcgttgacgactcgcaaccccgaagcctttagacagcaaccccaggccaaccgtctatcggccatcatggaagctgtagtgccttcccgctctaatcccactcatgagaaggtcctggccatcgtgaacgcgttggtggagaacaaagctattcgtccagatgaggccggactggtatacaacgctctcttagaacgcgtggctcgctacaacagtagcaatgtgcaaaccaatttggaccgtatgataacagatgtacgcgaagccgtgtctcagcgcgaaaggttccagcgtgatgccaacctgggttcgctggtggcgttaaatgctttcttgagtactcagcctgctaatgtgccgcgtggtcaacaggattatactaactttttaagtgctttgagactgatggtatcagaagtacctcagagcgaagtgtatcagtccggtcctgattacttctttcagactagcagacagggcttgcagacggtaaatctgagccaagcttttaaaaaccttaaaggtttgtggggagtgcatgccccggtaggagaaagagcaaccgtgtctagcttgttaactccgaactcccgcctattattactgttggtagctcctttcaccgacagcggtagcatcgaccgtaattcctatttgggttacctactaaacctgtatcgcgaagccatagggcaaagtcaggtggacgagcagacctatcaagaaattacccaagtcagtcgcgctttgggacaggaagacactggcagtttggaagccactctgaacttcttgcttaccaatcggtctcaaaagatccctcctcaatatgctcttactgcggaggaggagaggatccttagatatgtgcagcagagcgtgggattgtttctgatgcaagagggggcaactccgactgcagcactggacatgacagcgcgaaatatggagcccagcatgtatgccagtaaccgacctttcattaacaaactgctggactacttgcacagagctgccgctatgaactctgattatttcaccaatgccatcttaaacccgcactggctgcccccacctggtttctacacgggcgaatatgacatgcccgaccctaatgacggatttctgtgggacgacgtggacagcgatgttttttcacctctttctgatcatcgcacgtggaaaaaggaaggcggcgatagaatgcattcttctgcatcgctgtccggggtcatgggtgctaccgcggctgagcccgagtctgcaagtccttttcctagtctacccttttctctacacagtgtacgtagcagcgaagtgggtagaataagtcgcccgagtttaatgggcgaagaggagtatctaaacgattccttgctcagaccggcaagagaaaaaaatttcccaaacaatggaatagaaagtttggtggataaaatgagtagatggaagacttatgctcaggatcacagagacgagcctgggatcatggggattacaagtagagcgagccgtagacgccagcgccatgacagacagaggggtcttgtgtgggacgatgaggattcggccgatgatagcagcgtgctggacttgggtgggagaggaaggggcaacccgtttgctcatttgcgccctcgcttgggtggtatgttgtaaaaaaaaataaaaaaaaaactcaccaaggccatggcgacgagcgtacgttcgttcttctttattatctgtgtctagtataatgaggcgagtcgtgctaggcggagcggtggtgtatccggagggtcctcctccttcgtacgagagcgtgatgcagcagcagcaggcgacggcggtgatgcaatccccactggaggctccctttgtgcctccgcgatacctggcacctacggagggcagaaacagcattcgttattcggaactggcacctcagtacgataccaccaggttgtatctggtggacaacaagtcggcggacattgcttctctgaactatcagaatgaccacagcaacttcttgaccacggtggtgcaaaacaatgactttacccctacggaagccagcacccagaccattaactttgatgaacgatcgcggtggggcggtcagctaaagaccatcatgcatactaacatgccaaacgtgaacgagtatatgtttagtaacaagttcaaagcgcgtgtgatggtgtccagaaaacctcccgacggtgctgcagttggggatacttatgatcacaagcaggatattttgaaatatgagtggttcgagtttactttgccagaaggcaacttttcagttactatgactattgatttgatgaacaatgccatcatagataattacttgaaagtgggtagacagaatggagtgcttgaaagtgacattggtgttaagttcgacaccaggaacttcaagctgggatgggatcccgaaaccaagttgatcatgcctggagtgtatacgtatgaagccttccatcctgacattgtcttactgcctggctgcggagtggattttaccgagagtcgtttgagcaaccttcttggtatcagaaaaaaacagccatttcaagagggttttaagattttgtatgaagatttagaaggtggtaatattccggccctcttggatgtagatgcctatgagaacagtaagaaagaacaaaaagccaaaatagaagctgctacagctgctgcagaagctaaggcaaacatagttgccagcgactctacaagggttgctaacgctggagaggtcagaggagacaattttgcgccaacacctgttccgactgcagaatcattattggccgatgtgtctgaaggaacggacgtgaaactcactattcaacctgtagaaaaagatagtaagaatagaagctataatgtgttggaagacaaaatcaacacagcctatcgcagttggtatctttcgtacaattatggcgatcccgaaaaaggagtgcgttcctggacattgctcaccacctcagatgtcacctgcggagcagagcaggtctactggtcgcttccagacatgatgaaggatcctgtcactttccgctccactagacaagtcagtaactaccctgtggtgggtgcagagcttatgcccgtcttctcaaagagcttctacaacgaacaagctgtgtactcccagcagctccgccagtccacctcgcttacgcacgtcttcaaccgctttcctgagaaccagattttaatccgtccgccggcgcccaccattaccaccgtcagtgaaaacgttcctgctctcacagatcacgggaccctgccgttgcgcagcagtatccggggagtccaacgtgtgaccgttactgacgccagacgccgcacctgtccctacgtgtacaaggcactgggcatagtcgcaccgcgcgtcctttcaagccgcactttctaaaaaaaaaaaaaatgtccattcttatctcgcccagtaataacaccggttggggtctgcgcgctccaagcaagatgtacggaggcgcacgcaaacgttctacccaacatcctgtccgtgttcgcggacattttcgcgctccatggggcgccctcaagggccgcactcgcgttcgaaccaccgtcgatgatgtaatcgatcaggtggttgccgacgcccgtaattatactcctactgcgcctacatctactgtggatgcagttattgacagtgtagtggctgacgctcgcaactatgctcgacgtaagagccggcgaaggcgcattgccagacgccaccgagctaccactgccatgcgagccgcaagagctctgctacgaagagctagacgcgtggggcgaagagccatgcttagggcggccagacgtgcagcttcgggcgccagcgccggcaggtcccgcaggcaagcagccgctgtcgcagcggcgactattgccgacatggcccaatcgcgaagaggcaatgtatactgggtgcgtgacgctgccaccggtcaacgtgtacccgtgcgcacccgtccccctcgcacttagaagatactgagcagtctccgatgttgtgtcccagcggcgaggatgtccaagcgcaaatacaaggaagaaatgctgcaggttatcgcacctgaagtctacggccaaccgttgaaggatgaaaaaaaaccccgcaaaatcaagcgggttaaaaaggacaaaaaagaagaggaagatggcgatgatgggctggcggagtttgtgcgcgagtttgccccacggcgacgcgtgcaatggcgtgggcgcaaagttcgacatgtgttgagacctggaacttcggtggtctttacacccggcgagcgttcaagcgctacttttaagcgttcctatgatgaggtgtacggggatgatgatattcttgagcaggcggctgaccgattaggcgagtttgcttatggcaagcgtagtagaataacttccaaggatgagacagtgtcgatacccttggatcatggaaatcccacccctagtcttaaaccggtcactttgcagcaagtgttacccgtaactccgcgaacaggtgttaaacgcgaaggtgaagatttgtatcccactatgcaactgatggtacccaaacgccagaagttggaggacgttttggagaaagtaaaagtggatccagatattcaacctgaggttaaagtgagacccattaagcaggtagcgcctggtctgggggtacaaactgtagacattaagattcccactgaaagtatggaagtgcaaactgaacccgcaaagcctactgccacctccactgaagtgcaaacggatccatggatgcccatgcctattacaactgacgccgccggtcccactcgaagatcccgacgaaagtacggtccagcaagtctgttgatgcccaattatgttgtacacccatctattattcctactcctggttaccgaggcactcgctactatcgcagccgaaacagtacctcccgccgtcgccgcaagacacctgcaaatcgcagtcgtcgccgtagacgcacaagcaaaccgactcccggcgccctggtgcggcaagtgtaccgcaatggtagtgcggaacctttgacactgccgcgtgcgcgttaccatccgagtatcatcacttaatcaatgttgccgctgcctccttgcagatatggccctcacttgtcgccttcgcgttcccatcactggttaccgaggaagaaactcgcgccgtagaagagggatgttgggacgcggaatgcgacgctacaggcgacggcgtgctatccgcaagcaattgcggggtggttttttaccagccttaattccaattatcgctgctgcaattggcgcgataccaggcatagcttccgtggcggttcaggcctcgcaacgacattgacattggaaaaaaacgtataaataaaaaaaaaaaaatacaatggactctgacactcctggtcctgtgactatgttttcttagagatggaagacatcaatttttcatccttggctccgcgacacggcacgaagccgtacatgggcacctggagcgacatcggcacgagccaactgaacgggggcgccttcaattggagcagtatctggagcgggcttaaaaattttggctcaaccataaaaacatacgggaacaaagcttggaacagcagtacaggacaggcgcttagaaataaacttaaagaccagaacttccaacaaaaagtagtcgatgggatagcttccggcatcaatggagtggtagatttggctaaccaggctgtgcagaaaaagataaacagtcgtttggacccgccgccagcaaccccaggtgaaatgcaagtggaggaagaaattcctccgccagaaaaacgaggcgacaagcgtccgcgtcccgatttggaagagacgctggtgacgcgcgtagatgaaccgccttcttatgaggaagcaacgaagcttggaatgcccaccactagaccgatagccccaatggccaccggggtgatgaaaccttctcagttgcatcgacccgtcaccttggatttgccccctccccctgctgctactgctgtacccgcttctaagcctgtcgctgccccgaaaccagtcgccgtagccaggtcacgtcccgggggcgctcctcgtccaaatgcgcactggcaaaatactctgaacagcatcgtgggtctaggcgtgcaaagtgtaaaacgccgtcgctgcttttaattaaatatggagtagcgcttaacttgcctatctgtgtatatgtgtcattacacgccgtcacagcagcagaggaaaaaaggaagaggtcgtgcgtcgacgctgagttactttcaagatggccaccccatcgatgctgccccaatgggcatacatgcacatcgccggacaggatgcttcggagtacctgagtccgggtctggtgcagttcgcccgcgccacagacacctacttcaatctgggaaataagtttagaaatcccaccgtagcgccgacccacgatgtgaccaccgaccgtagccagcggctcatgttgcgcttcgtgcccgttgaccgggaggacaatacatactcttacaaagtgcggtacaccctggccgtgggcgacaacagagtgctggatatggccagcacgttctttgacattaggggtgtgttggacagaggtcccagtttcaaaccctattctggtacggcttacaactccctggctcctaaaggcgctccaaatacatctcagtggattgcagaaggtgtaaaaaatacaactggtgaggaacacgtaacagaagaggaaaccaatactactacttacacttttggcaatgctcctgtaaaagctgaagctgaaattacaaaagaaggactcccagtaggtttggaagtttcagatgaagaaagtaaaccgatttatgctgataaaacatatcagccagaacctcagctgggagatgaaacttggactgaccttgatggaaaaaccgaaaagtatggaggcagggctctcaaacccgatactaagatgaaaccatgctacgggtcctttgccaaacctactaatgtgaaaggcggtcaggcaaaacaaaaaacaacggagcagccaaatcagaaagtcgaatatgatatcgacatggagttttttgatgcggcatcgcagaaaacaaacttaagtcctaaaattgtcatgtatgcagaaaatgtaaatttggaaactccagacactcatgtagtgtacaaacctggaacagaagacacaagttccgaagctaatttgggacaacaatctatgcccaacagacccaactacattggcttcagagataactttattggacttatgtactataacagtactggtaacatgggggtgctggctggtcaagcgtctcagttaaatgcagtggttgacttgcaggacagaaacacagaactttcttaccaactcttgcttgactctctgggcgacagaaccagatactttagcatgtggaatcaggctgtggacagttatgatcctgatgtacgtgttattgaaaatcatggtgtggaagatgaacttcccaactactgttttccactggacggcataggtgttccaacaaccagttacaaatcaatagttccaaatggagacaatgcgcctaattggaaggaacctgaagtaaatggaacaagtgagatcggacagggtaatttgtttgccatggaaattaaccttcaagccaatctatggcgaagtttcctttattccaatgtggctctatatctcccagactcgtacaaatacaccccgtccaatgtcactcttccagaaaacaaaaacacctacgactacatgaacgggcgggtggtgccgccatctctagtagacacctatgtgaacattggtgccaggtggtctctggatgccatggacaatgtcaacccattcaaccaccaccgtaacgctggcttgcgttaccgatccatgcttctgggtaacggacgttatgtgcctttccacatacaagtgcctcaaaaattcttcgctgttaaaaacctgctgcttctcccaggctcctacacttatgagtggaactttaggaaggatgtgaacatggttctacagagttccctcggtaacgacctgcgggtagatggcgccagcatcagtttcacgagcatcaacctctatgctacttttttccccatggctcacaacaccgcttccacccttgaagccatgctgcggaatgacaccaatgatcagtcattcaacgactacctatctgcagctaacatgctctaccccattcctgccaatgcaaccaatattcccatttccattccttctcgcaactgggcggctttcagaggctggtcatttaccagactgaaaaccaaagaaactccctctttggggtctggatttgacccctactttgtctattctggttctattccctacctggatggtaccttctacctgaaccacacttttaagaaggtttccatcatgtttgactcttcagtgagctggcctggaaatgacaggttactatctcctaacgaatttgaaataaagcgcactgtggatggcgaaggctacaacgtagcccaatgcaacatgaccaaagactggttcttggtacagatgctcgccaactacaacatcggctatcagggcttctacattccagaaggatacaaagatcgcatgtattcatttttcagaaacttccagcccatgagcaggcaggtggttgatgaggtcaattacaaagacttcaaggccgtcgccataccctaccaacacaacaactctggctttgtgggttacatggctccgaccatgcgccaaggtcaaccctatcccgctaactatccctatccactcattggaacaactgccgtaaatagtgttacgcagaaaaagttcttgtgtgacagaaccatgtggcgcataccgttctcgagcaacttcatgtctatgggggcccttacagacttgggacagaatatgctctatgccaactcagctcatgctctggacatgacctttgaggtggatcccatggatgagcccaccctgctttatcttctcttcgaagttttcgacgtggtcagagtgcatcagccacaccgcggcatcatcgaggcagtctacctgcgtacaccgttctcggccggtaacgctaccacgtaagaagcttcttgcttcttgcaaatagcagctgcaaccatggcctgcggatcccaaaacggctccagcgagcaagagctcagagccattgtccaagacctgggttgcggaccctattttttgggaacctacgataagcgcttcccggggttcatggcccccgataagctcgcctgtgccattgtaaatacggccggacgtgagacggggggagagcactggttggctttcggttggaacccacgttctaacacctgctacctttttgatccttttggattctcggatgatcgtctcaaacagatttaccagtttgaatatgagggtctcctgcgccgcagcgctcttgctaccaaggaccgctgtattacgctggaaaaatctacccagaccgtgcagggtccccgttctgccgcctgcggacttttctgctgcatgttccttcacgcctttgtgcactggcctgaccgtcccatggacggaaaccccaccatgaaattgctaactggagtgccaaacaacatgcttcattctcctaaagtccagcccaccctgtgtgacaatcaaaaagcactctaccattttcttaatacccattcgccttattttcgctcccatcgtacacacatcgaaagggccactgcgttcgaccgtatggatgttcaataatgactcatgtaaacaacgtgttcaataaacatcactttatttttttacatgtatcaaggctctgcattacttatttatttacaagtcgaatgggttctgacgagaatcagaatgacccgcaggcagtgatacgttgcggaactgatacttgggttgccacttgaattcgggaatcaccaacttgggaaccggtatatcgggcaggatgtcactccacagctttctggtcagctgcaaagctccaagcaggtcaggagccgaaatcttgaaatcacaattaggaccagtgctttgagcgcgagagttgcggtacaccggattgcagcactgaaacaccatcagcgacggatgtctcacgcttgccagcacggtgggatctgcaatcatgcccacatccagatcttcagcattggcaatgctgaacggggtcatcttgcaggtctgcctacccatggcgggcacccaattaggcttgtggttgcaatcgcagtgcagggggatcagtatcatcttggcctgatcctgtctgattcctggatacacggctctcatgaaagcatcatattgcttgaaagcctgctgggctttactaccctcggtataaaacatcccgcaggacctgctcgaaaactggttagctgcacagccggcatcattcacacagcagcgggcgtcattgttagctatttgcaccacacttctgccccagcggttttgggtgattttggttcgctcgggattctcctttaaggctcgttgtccgttctcgctggccacatccatctcgataatctgctccttctgaatcataatattgccatgcaggcacttcagcttgccctcataatcattgcagccatgaggccacaacgcacagcctgtacattcccaattatggtgggcgatctgagaaaaagaatgtatcattccctgcagaaatcttcccatcatcgtgctcagtgtcttgtgactagtgaaagttaactggatgcctcggtgctcctcgtttacgtactggtgacagatgcgcttgtattgttcgtgttgctcaggcattagtttaaaagaggttctaagttcgttatccagcctgtacttctccatcagcagacacatcacttccatgcctttctcccaagcagacaccaggggcaagctaatcggattcttaacagtgcaggcagcagctcctttagccagagggtcatctttagcgatcttctcaatgcttcttttgccatccttctcaacgatgcgcacgggcgggtagctgaaacccactgctacaagttgcgcctcttctctttcttcttcgctgtcttgactgatgtcttgcatggggatatgtttggtcttccttggcttctttttggggggtatcggaggaggaggactgtcgctccgttccggagacagggaggattgtgacgtttcgctcaccattaccaactgactgtcggtagaagaacctgaccccacacggcgacaggtgtttctcttcgggggcagaggtggaggcgattgcgaagggctgcggtccgacctggaaggcggatgactggcagaaccccttccgcgttcgggggtgtgctccctgtggcggtcgcttaactgatttccttcgcggctggccattgtgttctcctaggcagagaaacaacagacatggaaactcagccattgctgtcaacatcgccacgagtgccatcacatctcgtcctcagcgacgaggaaaaggagcagagcttaagcattccaccgcccagtcctgccaccacctctaccctagaagataaggaggtcgacgcatctcatgacatgcagaataaaaaagcgaaagagtctgagacagacatcgagcaagacccgggctatgtgacaccggtggaacacgaggaagagttgaaacgctttctagagagagaggatgaaaactgcccaaaacaacgagcagataactatcaccaagatgctggaaatagggatcagaacaccgactacctcatagggcttgacggggaagacgcgctccttaaacatctagcaagacagtcgctcatagtcaaggatgcattattggacagaactgaagtgcccatcagtgtggaagagctcagccgcgcctacgagcttaacctcttttcacctcgtactccccccaaacgtcagccaaacggcacctgcgagccaaatcctcgcttaaacttttatccagcttttgctgtgccagaagtactggctacctatcacatcttttttaaaaatcaaaaaattccagtctcctgccgcgctaatcgcacccgcgccgatgccctactcaatctgggacctggttcacgcttacctgatatagcttccttggaagaggttccaaagatcttcgagggtctgggcaataatgagactcgggccgcaaatgctctgcaaaagggagaaaatggcatggatgagcatcacagcgttctggtggaattggaaggcgataatgccagactcgcagtactcaagcgaagcatcgaggtcacacacttcgcatatcccgctgtcaacctgccccctaaagtcatgacggcggtcatggaccagttactcattaagcgcgcaagtcccctttcagaagacatgcatgacccagatgcctgtgatgagggtaaaccagtggtcagtgatgagcagctaacccgatggctgggcaccgactctcccagggatttggaagagcgtcgcaagcttatgatggccgtggtgctggttaccgtagaactagagtgtctccgacgtttctttaccgattcagaaaccttgcgcaaactcgaagagaatctgcactacacttttagacacggctttgtgcggcaggcatgcaagatatctaacgtggaactcaccaacctggtttcctacatgggtattctgcatgagaatcgcctaggacaaagcgtgctgcacagcaccctgaagggggaagcccgccgtgattacatccgcgattgtgtctatctgtacctgtgccacacgtggcaaaccggcatgggtgtatggcagcaatgtttagaagaacagaacttgaaagagcttgacaagctcttacagaaatctcttaaggttctgtggacagggttcgacgagcgcaccgtcgcttccgacctggcagacctcatcttcccagagcgtctcagggttactttgcgaaacggattgcctgactttatgagccagagcatgcttaacaattttcgctctttcatcctggaacgctccggtatcctgcccgccacctgctgcgcactgccctccgactttgtgcctctcacctaccgcgagtgccccccgccgctatggagtcactgctacctgttccgtctggccaactatctctcctaccactcggatgtgatcgaggatgtgagcggagacggcttgctggagtgtcactgccgctgcaatctgtgcacgccccaccggtccctagcttgcaacccccagttgatgagcgaaacccagataataggcacctttgaattgcaaggccccagcagccaaggcgatgggtcttctcctgggcaaagtttaaaactgaccccgggactgtggacctccgcctacttgcgcaagtttgctccggaagattaccacccctatgaaatcaagttctatgaggaccaatcacagcctccaaaggccgaactttcggcctgcgtcatcacccagggggcaattctggcccaattgcaagccatccaaaaatcccgccaagaatttctactgaaaaagggtaagggggtctaccttgacccccagaccggcgaggaactcaacacaaggttccctcaggatgtcccaacgacgagaaaacaagaagttgaaggtgcagccgccgcccccagaagatatggaggaagattgggacagtcaggcagaggaggcggaggaggacagtctggaggacagtctggaggaagacagtttggaggaggaaaacgaggaggcagaggaggtggaagaagtaaccgccgacaaacagttatcctcggctgcggagacaagcaacagcgctaccatctccgctccgagtcgaggaacccggcggcgtcccagcagtagatgggacgagaccggacgcttcccgaacccaaccagcgcttccaagaccggtaagaaggatcggcagggatacaagtcctggcgggggcataagaatgccatcatctcctgcttgcatgagtgcgggggcaacatatccttcacgcggcgctacttgctattccaccatggggtgaactttccgcgcaatgttttgcattactaccgtcacctccacagcccctactatagccagcaaatcccggcagtctcgacagataaagacagcggcggcgacctccaacagaaaaccagcagcggcagttagaaaatacacaacaagtgcagcaacaggaggattaaagattacagccaacgagccagcgcaaacccgagagttaagaaatcggatctttccaaccctgtatgccatcttccagcagagtcggggtcaagagcaggaactgaaaataaaaaaccgatctctgcgttcgctcaccagaagttgtttgtatcacaagagcgaagatcaacttcagcgcactctcgaggacgccgaggctctcttcaacaagtactgcgcgctgactcttaaagagtaggcagcgaccgcgcttattcaaaaaaggcgggaattacatcatcctcgacatgagtaaagaaattcccacgccttacatgtggagttatcaaccccaaatgggattggcggcaggcgcctcccaggactactccacccgcatgaattggctcagcgccgggccttctatgatttctcgagttaatgatatacgcgcctaccgaaaccaaatacttttggaacagtcagctcttaccaccacgccccgccaacaccttaatcccagaaattggcccgccgccctagtgtaccaggaaagtcccgctcccaccactgtattacttcctcgagacgcccaggccgaagtccaaatgactaatgcaggtgcgcagttagctggcggctccaccctatgtcgtcacaggcctcggcataatataaaacgcctgatgatcagaggccgaggtatccagctcaacgacgagtcggtgagctctccgcttggtctacgaccagacggaatctttcagattgccggctgcgggagatcttccttcacccctcgtcaggctgttctgactttggaaagttcgtcttcgcaaccccgctcgggcggaatcgggaccgttcaatttgtggaggagtttactccctctgtctacttcaaccccttctccggatctcctgggcattacccggacgagttcataccgaacttcgacgcgattagcgagtcagtggacggctacgattgatgtctggtgacgcggctgagctatctcggctgcgacatctagaccactgccgccgctttcgctgctttgcccgggaactcattgagttcatctacttcgaactccccaaggatcaccctcaaggtccggcccacggagtgcggatttctatcgaaggcaaaatagactctcgcctgcaacgaattttctcccagcggcccgtgctgatcgagcgagaccagggaaacaccacggtttccatctactgcatttgtaatcaccccggattgcatgaaagcctttgctgtcttatgtgtactgagtttaataaaaactgaattaagactctcctacggactgccgcttcttcaacccggattttacaaccagaagaacgaaacttttcctgtcgtccaggactctgttaacttcacctttcctactcacaaactagaagctcaacgactacaccgcttttccagaagcattttccctactaatactactttcaaaaccggaggtgagctccaaggtcttcctacagaaaacccttgggtggaagcgggccttgtagtgctaggaattcttgcgggtgggcttgtgattattctttgctacctatacacaccttgcttcactttcttagtggtgttgtggtattggtttaaaaaatggggcccatactagtcttgcttgttttactttcgcttttggaaccgggttctgccaattacgatccatgtctagacttcgacccagaaaactgcacacttacttttgcacccgacacaagccgcatctgtggagttcatcgcctctcttacgaacttggcccccaacgacaaaaatttacctgcatggtgggaatcaaccccatagttatcacccagcaaagtggagatactaagggttgcattcactgctcctgcgattccatcgagtgcacctacaccctgctgaagaccctatgcggcctaagagacctgctaccaatgaattaaaaaatgattaataaaaaatcacttacttgaaatcagcaataaggtctctgttgaaattttctcccagcagcacctcacttccctcttcccaactctggtattctaaaccccgttcagcggcatactttctccatactttaaaggggatgtcaaattttagctcctctcctgtacccacaatcttcatgtctttcttcccagatgaccaagagagtccggctcagtgactccttcaaccctgtctacccctatgaagatgaaagcacctcccaacacccctttataaacccagggtttatttccccaaatggcttcacacaaagcccaaacggagttcttactttaaaatgtttaaccccactaacaaccacaggcggatctctacagctaaaagtgggagggggacttacagtggatgacaccaacggttttttgaaagaaaacataagtgccaccacaccactcgttaagactggtcactctataggtttaccactaggagccggattgggaacgaatgaaaataaactttgtatcaaattaggacaaggacttacattcaattcaaacaacatttgcattgatgacaatattaacaccttatggacaggagtcaaccccaccgaagccaactgtcaaatcatgaactccagtgaatctaatgattgcaaattaattctaacactagttaaaactggagcactagtcactgcatttgtttatgttataggagtatctaacaattttaatatgctaactacacacagaaatataaattttactgcagagctgtttttcgattctactggtaatttactaactagactctcatccctcaaaactccacttaatcataaatcaggacaaaacatggctactggtgccattactaatgctaaaggtttcatgcccagcacgactgcctatcctttcaatgataattctagagaaaaagaaaactacatttacggaacttgttactacacagctagtgatcgcactgcttttcccattgacatatctgtcatgcttaaccgaagagcaataaatgacgagacatcatattgtattcgtataacttggtcctggaacacaggagatgccccagaggtgcaaacctctgctacaaccctagtcacctccccatttaccttttactacatcagagaagacgactgacaaataaagtttgcgatcgccaggcccaccatgtgccaccaacagctggtgatcagctggttctccctcgtgttcctcgcttcccctctggtggccatctgggagctgaagaaggacgtctacgtggtcgagctggactggtaccccgatgcccccggcgagatggtggtgctcacatgcgacacccccgaggaggatggcatcacatggacactggatcaaagctccgaagtgctgggctccggcaagaccctcaccattcaagtgaaggagttcggagacgccggccaatacacatgccacaaaggcggagaggtgctgtcccactctctgctgctgctgcataagaaggaggacggcatttggtccaccgacattctgaaagaccagaaggagcctaaaaataaaacctttctgagatgcgaggccaagaactactccggaagattcacatgctggtggctgaccacaatctccacagacctcaccttttccgtgaaatcctctagaggaagcagcgatcctcaaggagtgacatgcggcgctgctacactcagcgccgaaagagtgagaggagataacaaggagtacgagtacagcgtggagtgccaagaggattccgcttgtcccgctgccgaagagtccctccccattgaagtgatggtggacgccgtgcataaactgaaatacgagaattacacctccagcttttttattagagacattattaaacccgacccccccaaaaacctccagctcaagcccctcaaaaatagcagacaagtggaggtgagctgggagtatcccgatacatggagcaccccccacagctatttctccctcaccttctgtgtgcaagtgcaaggcaaatccaagagggagaagaaggatagagtgttcaccgacaaaaccagcgccaccgtcatctgcagaaaaaacgctagcatcagcgtcagagcccaagatagatattactcctccagctggtccgagtgggccagcgtcccttgttccggaggcggaggatccggaggaggaggaagcggcggaggaggctccagaaacctccccgtggctacacccgaccccggaatgtttccttgcctccaccactcccaaaatctgctcagagccgtgtccaacatgctccagaaggccagacaaacactggaattctacccttgcacctccgaggaaatcgatcacgaggacatcaccaaggacaagacaagcaccgtggaagcttgtctgcctctggaactcaccaagaacgagagctgtctgaactctagagaaacaagcttcattacaaacggcagctgtctggccagcagaaagacaagcttcatgatggctctgtgtctgtccagcatctacgaggatctgaagatgtaccaagtggagtttaaaaccatgaacgctaagctgctgatggaccctaagaggcagattttcctcgaccagaacatgctggccgtgattgacgaactgatgcaagctctgaacttcaacagcgagacagtgcctcaaaagtccagcctcgaggagcccgacttctacaagaccaagatcaagctgtgcattctgctgcatgccttcagaatcagagccgtcaccatcgatagagtcatgagctatctgaacgctagcggaagcggagagggaaggggaagcctcctcacatgtggcgatgtggaagaaaaccccggacccgctcaatctctggctctgtctctgctgattctggtgctggctttcggcatccccagaacacaaggcagcgatggcggcgctcaagactgctgtctgaagtacagccagaggaagatccccgccaaggtcgtgaggagctatagaaaacaagagccttctctgggatgttccattcccgccattctgttcctccccagaaagagatcccaagccgaactgtgtgccgaccccaaggagctgtgggtgcagcagctgatgcagcatctggacaagaccccttcccctcagaagcccgctcaaggctgcagaaaagataggggagccagcaagaccggcaagaagggaaagggatccaagggctgtaagagaaccgaaaggagccagacacccaagggacccggcagcggacagtgtacaaactacgctctgctgaagctggccggagacgtggaaagcaaccccggccccgcccctaggagagctagaggctgtagaacactgggactgcccgctctgctgctgctgctgctgctgagaccccccgccacaaggggaattacatgccctccccctatgtccgtcgagcacgccgacatctgggtgaagagctactccctctactctagagagaggtatatctgtaatagcggctttaagaggaaggccggaaccagctctctgaccgaatgcgtgctgaataaggctacaaacgtggcccactggacaacccccagcctcaagtgtattagggacgaacaaaagctcatcagcgaggaggatctggctgtgggacaagatacccaagaggtgatcgtcgtccctcactctctgccttttaaggtggtcgtcatcagcgccattctggctctggtcgtgctcaccatcatttctctgatcatcctcatcatgctctggcagaagaaacctagaggctccggcgctaccaatttctctctgctgaagcaagctggcgacgtcgaagaaaatcccggacccgactggacatggaggattctgtttctggtggctgctgccaccggagctcatagcaactgggtgaacgtcattagcgatctgaagaagattgaggatctgatccagtccatgcacatcgacgccacactctataccgagagcgatgtgcaccccagctgcaaggtgaccgccatgaaatgctttctgctggaactgcaagtgatctctctggagtccggcgacgccagcatccatgataccgtggagaatctgatcattctcgccaacaactctctgagcagcaacggcaatgtgacagaatccggctgcaaggagtgtgaagagctcgaggaaaagaatatcaaggagtttctgcagtccttcgtgcacatcgtccaaatgttcatcaatacaagctgagctagcttgactgactgagatacagcgtaccttcagctcacagacatgataagatacattgatgagtttggacaaaccacaactagaatgcagtgaaaaaaatgctttatttgtgaaatttgtgatgctattgctttatttgtaaccattataagctgcaataaacaagttaacaacaacaattgcattcattttatgtttcaggttcagggggaggtgtgggaggttttttaaagcaagtaaaacctctacaaatgtggtagtcgtcagctatcctgcaggaacttgtttatttgaaaatcaattcacaaaatccgagtagttattttgcctcccccttcccatttaacagaatacaccaatctctccccacgcacagctttaaacatttggataccattagatatagacatggttttagattccacattccaaacagtttcagagcgagccaatctggggtcagtgatagataaaaatccatcgggatagtcttttaaagcgctttcacagtccaactgctgcggatgcgactccggagtctggatcacggtcatctggaagaagaacgatgggaatcataatccgaaaacggtatcggacgattgtgtctcatcaaacccacaagcagccgctgtctgcgtcgctccgtgcgactgctgtttatgggatcagggtccacagtgtcctgaagcatgattttaatagcccttaacatcaactttctggtgcgatgcgcgcagcaacgcattctgatttcactcaaatctttgcagtaggtacaacacattattacaatattgtttaataaaccataattaaaagcgctccagccaaaactcatatctgatataatcgcccctgcatgaccatcataccaaagtttaatataaattaaatgacgttccctcaaaaacacactacccacatacatgatctcttttggcatgtgcatattaacaatctgtctgtaccatggacaacgttggttaatcatgcaacccaatataaccttccggaaccacactgccaacaccgctcccccagccatgcattgaagtgaaccctgctgattacaatgacaatgaagaacccaattctctcgaccgtgaatcacttgagaatgaaaaatatctatagtggcacaacatagacataaatgcatgcatcttctcataatttttaactcctcaggatttagaaacatatcccagggaataggaagctcttgcagaacagtaaagctggcagaacaaggaagaccacgaacacaacttacactatgcatagtcatagtatcacaatctggcaacagcgggtggtcttcagtcatagaagctcgggtttcattttcctcacaacgtggtaactgggctctggtgtaagggtgatgtctggcgcatgatgtcgagcgtgcgcgcaaccttgtcataatggagttgcttcctgacattctcgtattttgtatagcaaaacgcggccctggcagaacacactcttcttcgccttctatcctgccgcttagcgtgttccgtgtgatagttcaagtacaaccacactcttaagttggtcaaaagaatgctggcttcagttgtaatcaaaactccatcgcatctaatcgttctgaggaaatcatccaagcaatgcaactggattgtgtttcaagcaggagaggagagggaagagacggaagaaccatgttaatttttattccaaacgatctcgcagtacttcaaattgtagatcgcgcagatggcatctctcgcccccactgtgttggtgaaaaagcacagctagatcaaaagaaatgcgattttcaaggtgctcaacggtggcttccagcaaagcctccacgcgcacatccaagaacaaaagaataccaaaagaaggagcattttctaactcctcaatcatcatattacattcctgcaccattcccagataattttcagctttccagccttgaattattcgtgtcagttcttgtggtaaatccaatccacacattacaaacaggtcccggagggcgccctccaccaccattcttaaacacaccctcataatgacaaaatatcttgctcctgtgtcacctgtagcgaattgagaatggcaacatcaattgacatgcccttggctctaagttcttctttaagttctagttgtaaaaactctctcatattatcaccaaactgcttagccagaagccccccgggaacaagagcaggggacgctacagtgcagtacaagcgcagacctccccaattggctccagcaaaaacaagattggaataagcatattgggaaccgccagtaatatcatcgaagttgctggaaatataatcaggcagagtttcttgtaaaaattgaataaaagaaaaatttgccaaaaaaacattcaaaacctctgggatgcaaatgcaataggttaccgcgctgcgctccaacattgttagttttgaattagtctgcaaaaataaaaaaaaaaacaagcgtcatatcatagtagcctgacgaacagatggataaatcagtctttccatcacaagacaagccacagggtctccagctcgaccctcgtaaaacctgtcatcatgattaaacaacagcaccgaaagttcctcgcggtgaccagcatgaataattcttgatgaagcatacaatccagacatgttagcatcagttaacgagaaaaaacagccaacatagcctttgggtataattatgcttaatcgtaagtatagcaaagccacccctcgcggatacaaagtaaaaggcacaggagaataaaaaatataattatttctctgctgctgttcaggcaacgtcgcccccggtccctctaaatacacatacaaagcctcatcagccatggcttaccagacaaagtacagcgggcacacaaagcacaagctctaaagtgactctccaacctctccacaatatatatatacacaagccctaaactgacgtaatgggagtaaagtgtaaaaaatcccgccaaacccaacacacaccccgaaactgcgtcaccagggaaaagtacagtttcacttccgcaatcccaacaggcgtaacttcctctttctcacggtacgtgatatcccactaacttgcaacgtcattttcccacggtcgcaccgccccttttagccgttaaccccacagccaatcaccacacgatccacactttttaaaatcacctcatttacatattggcaccattccatctataaggtatattatatagataga

SEQ ID NO: 231 - DNA, 35527 bp, Artificial Sequence
  Genome sequence of NG-796A virus
tctatctatataatataccttatagatggaatggtgccaatatgtaaatgaggtgattttaaaaagtgtggatcgtgtggtgattggctgtggggttaacggctaaaaggggcggtgcgaccgtgggaaaatgacgttttgtgggggtggagtttttttgcaagttgtcgcgggaaatgtgacgcataaaaaggcttttttctcacggaactacttagttttcccacggtatttaacaggaaatgaggtagttttgaccggatgcaagtgaaaattgttgattttcgcgcgaaaactgaatgaggaagtgtttttctgaataatgtggtatttatggcagggtggagtatttgttcagggccaggtagactttgacccattacgtggaggtttcgattaccgtgttttttacctgaatttccgcgtaccgtgtcaaagtcttctgtttttacgtaggtgtcagctgatcgctagggtatttatacctcagggtttgtgtcaagaggccactcttgagtgccagcgagaagagttttctcctctgcgccggcagtttaataataaaaaaatgagagatttgcgatttctgcctcaggaaataatctctgctgagactggaaatgaaatattggagcttgtggtgcacgccctgatgggagacgatccggagccacctgtgcagctttttgagcctcctacgcttcaggaactgtatgatttagaggtagagggatcggaggattctaatgaggaagctgtaaatggcttttttaccgattctatgcttttagctgctaatgaagggttagaattagatccgcctttggacacttttgatactccaggggtaattgtggaaagcggtacaggtgtaagaaaattacctgatttgagttccgtggactgtgatttgcactgctatgaagacgggtttcctccgagtgatgaggaggaccatgaaaaggagcagtccatgcagactgcagcgggtgagggagtgaaggctgccaatgttggttttcagttggattgcccggagcttcctggacatggctgtaagtcttgtgaatttcacaggaaaaatactggagtaaaggaactgttatgttcgctttgttatatgagaacgcactgccactttatttacagtaagtgtgtttaagttaaaatttaaaggaatatgctgtttttcacatgtatattgagtgtgagttttgtgcttcttattataggtcctgtgtctgatgctgatgaatcaccatctcctgattctactacctcacctcctgagattcaagcacctgttcctgtggacgtgcgcaagcccattcctgtgaagcttaagcctgggaaacgtccagcagtggaaaaacttgaggacttgttacagggtggggacggacctttggacttgagtacacggaaacgtccaagacaataagtgttccatatccgtgtttacttaaggtgacgtcaatatttgtgtgacagtgcaatgtaataaaaatatgttaactgttcactggtttttattgctttttgggcggggactcaggtatataagtagaagcagacctgtgtggttagctcataggagctggctttcatccatggaggtttgggccattttggaagaccttaggaagactaggcaactgttagagaacgcttcggacggagtctccggtttttggagattctggttcgctagtgaattagctagggtagtttttaggataaaacaggactataaacaagaatttgaaaagttgttggtagattgcccaggactttttgaagctcttaatttgggccatcaggttcactttaaagaaaaagttttatcagttttagacttttcaaccccaggtagaactgctgctgctgtggcttttcttacttttatattagataaatggatcccgcagactcatttcagcaggggatacgttttggatttcatagccacagcattgtggagaacatggaaggttcgcaagatgaggacaatcttaggttactggccagtgcagcctttgggtgtagcgggaatcctgaggcatccaccggtcatgccagcggttctggaggaggaacagcaagaggacaacccgagagccggcctggaccctccagtggaggaggcggagtagctgacttgtctcctgaactgcaacgggtgcttactggatctacgtccactggacgggataggggcgttaagagggagagggcatctagtggtactgatgctagatctgagttggctttaagtttaatgagtcgcagacgtcctgaaaccatttggtggcatgaggttcagaaagagggaagggatgaagtttctgtattgcaggagaaatattcactggaacaggtgaaaacatgttggttggagcctgaggatgattgggaggtggccattaaaaattatgccaagatagctttgaggcctgataaacagtataagattactagacggattaatatccggaatgcttgttacatatctggaaatggggctgaggtggtaatagatactcaagacaaggcagttattagatgctgcatgatggatatgtggcctggggtagtcggtatggaagcagtaacttttgtaaatgttaagtttaggggagatggttataatggaatagtgtttatggccaataccaaacttatattgcatggttgtagcttttttggtttcaacaatacctgtgtagatgcctggggacaggttagtgtacggggatgtagtttctatgcgtgttggattgccacagctggcagaaccaagagtcaattgtctctgaagaaatgcatatttcaaagatgtaacctgggcattctgaatgaaggcgaagcaagggtccgccactgcgcttctacagatactggatgttttattttgattaagggaaatgccagcgtaaagcataacatgatttgcggtgcttccgatgagaggccttatcaaatgctcacttgtgctggtgggcattgtaatatgctggctactgtgcatattgtttcccatcaacgcaaaaaatggcctgtttttgatcacaatgtgatgacgaagtgtaccatgcatgcaggtgggcgtagaggaatgtttatgccttaccagtgtaacatgaatcatgtgaaagtgttgttggaaccagatgccttttccagaatgagcctaacaggaatttttgacatgaacatgcaaatctggaagatcctgaggtatgatgatacgagatcgagggtacgcgcatgcgaatgcggaggcaagcatgccaggttccagccggtgtgtgtagatgtgactgaagatctcagaccggatcatttggttattgcccgcactggagcagagttcggatccagtggagaagaaactgactaaggtgagtattgggaaaactttggggtgggattttcagatggacagattgagtaaaaatttgttttttctgtcttgcagctgtcatgagtggaaacgcttcttttaaggggggagtcttcagcccttatctgacagggcgtctcccatcctgggcaggagttcgtcagaatgttatgggatctactgtggatggaagacccgtccaacccgccaattcttcaacgctgacctatgctactttaagttcttcacctttggacgcagctgcagctgccgccgccgcttctgttgccgctaacactgtgcttggaatgggttactatggaagcatcatggctaattccacttcctctaataacccttctaccctgactcaggacaagttacttgtccttttggcccagctggaggctttgacccaacgtctgggtgaactttctcagcaggtggtcgagttgcgagtacaaactgagtctgctgtcggcacggcaaagtctaaataaaaaaatcccagaatcaatgaataaataaacaagcttgttgttgatttaaaatcaagtgtttttatttcatttttcgcgcacggtatgccctagaccaccgatctctatcattgagaactcggtggattttttccaggatcctatagaggtgggattgaatgtttagatacatgggcattaggccgtctttggggtggagatagctccattgaagggattcatgctccggggtagtgttgtaaatcacccagtcataacaaggtcgcagtgcatggtgttgcacaatatcttttagaagtaggctgattgccacagataagcccttggtgtaggtgtttacaaaccggttgagctgggatgggtgcattcggggtgaaattatgtgcattttggattggatttttaagttggcaatattgccgccaagatcccgtcttgggttcatgttatgaaggaccaccaagacggtgtatccggtacatttaggaaatttatcgtgcagcttggatggaaaagcgtggaaaaatttggagacacccttgtgtcctccaagattttccatgcactcatccatgataatagcaatggggccgtgggcagcggcgcgggcaaacacgttccgtgggtctgacacatcatagttatgttcctgagttaaatcatcataagccattttaatgaatttggggcggagagtaccagattggggtatgaatgttccttcgggccccggagcatagttcccctcacagatttgcatttcccaagctttcagttccgagggtggaatcatgtccacctggggggctatgaaaaacaccgtttctggggcgggggtgattaattgtgatgatagcaaatttctgagcaattgagatttgccacatccggtggggccataaatgattccgattacgggttgcaggtggtagtttagggaacggcaactgccgtcttctcgaagcaagggggccacctcgttcatcatttcccttacatgcatattttcccgcaccaaatccattaggaggcgctctcctcctagtgatagaagttcttgtagtgaggaaaagtttttcagcggtttcagaccgtcagccatgggcattttggagagagtttgctgcaaaagttctagtctgttccacagttcagtgatgtgttctatggcatctcgatccagcagacctcctcgtttcgcgggtttggacggctcctggaatagggtatgagacgatgggcgtccagcgctgccagggttcggtccttccagggtctcagtgttcgagtcagggttgtttccgtcacagtgaaggggtgtgcgcctgcttgggcgcttgccagggtgcgcttcagactcatcctgctggtcgaaaacttctgtcgcttggcgccctgtatgtcggccaagtagcagtttaccatgagttcgtagttgagcgcctcggctgcgtggcctttggcgcggagcttacctttggaagttttcttgcataccgggcagtataggcatttcagcgcatacaacttgggcgcaaggaaaacggattctggggagtatgcatctgcgccgcaggaggcgcaaacagtttcacattccaccagccaggttaaatccggttcattggggtcaaaaacaagttttccgccatattttttgatgcgtttcttacctttggtctccatgagttcgtgtcctcgttgagtgacaaacaggctgtccgtgtccccgtagactgattttacaggcctcttctccagtggagtgcctcggtcttcttcgtacaggaactctgaccactctgatacaaaggcgcgcgtccaggccagcacaaaggaggctatgtgggaggggtagcgatcgttgtcaaccagggggtccaccttttccaaagtatgcaaacacatgtcaccctcttcaacatccaggaatgtgattggcttgtaggtgtatttcacgtgacctggggtccccgctgggggggtataaaagggggcggttctttgctcttcctcactgtcttccggatcgctgtccaggaacgtcagctgttggggtaggtattccctctcgaaggcgggcatgacctctgcactcaggttgtcagtttctaagaacgaggaggatttgatattgacagtgccggttgagatgcctttcatgaggttttcgtccatctggtcagaaaacacaatttttttattgtcaagtttggtggcaaatgatccatacagggcgttggataaaagtttggcaatggatcgcatggtttggttcttttccttgtccgcgcgctctttggcggcgatgttgagttggacatactcgcgtgccaggcacttccattcggggaagatagttgttaattcatctggcacgattctcacttgccaccctcgattatgcaaggtaattaaatccacactggtggccacctcgcctcgaaggggttcattggtccaacagagcctacctcctttcctagaacagaaagggggaagtgggtctagcataagttcatcgggagggtctgcatccatggtaaagattcccggaagtaaatccttatcaaaatagctgatgggagtggggtcatctaaggccatttgccattctcgagctgccagtgcgcgctcatatgggttaaggggactgccccatggcatgggatgggtgagtgcagaggcatacatgccacagatgtcatagacgtagatgggatcctcaaagatgcctatgtaggttggatagcatcgcccccctctgatacttgctcgcacatagtcatatagttcatgtgatggcgctagcagccccggacccaagttggtgcgattgggtttttctgttctgtagacgatctggcgaaagatggcgtgagaattggaagagatggtgggtctttgaaaaatgttgaaatgggcatgaggtagacctacagagtctctgacaaagtgggcataagattcttgaagcttggttaccagttcggcggtgacaagtacgtctagggcgcagtagtcaagtgtttcttgaatgatgtcataacctggttggtttttcttttcccacagttcgcggttgagaaggtattcttcgcgatccttccagtactcttctagcggaaacccgtctttgtctgcacggtaagatcctagcatgtagaactgattaactgccttgtaagggcagcagcccttctctacgggtagagagtatgcttgagcagcttttcgtagcgaagcgtgagtaagggcaaaggtgtctctgaccatgactttgaggaattggtatttgaagtcgatgtcgtcacaggctccctgttcccagagttggaagtctacccgtttcttgtaggcggggttgggcaaagcgaaagtaacatcattgaagagaatcttgccggccctgggcatgaaattgcgagtgatgcgaaaaggctgtggtacttccgctcggttattgataacctgggcagctaggacgatctcgtcgaaaccgttgatgttgtgtcctacgatgtataattctatgaaacgcggcgtgcctctgacgtgaggtagcttactgagctcatcaaaggttaggtctgtggggtcagataaggcgtagtgttcgagagcccattcgtgcaggtgaggattcgctttaaggaaggaggaccagaggtccactgccagtgctgtttgtaactggtcccggtactgacgaaaatgccgtccgactgccattttttctggggtgacgcaatagaaggtttgggggtcctgccgccagcgatcccacttgagttttatggcgaggtcataggcgatgttgacgagccgctggtctccagagagtttcatgaccagcatgaaggggattagctgcttgccaaaggaccccatccaggtgtaggtttccacatcgtaggtgagaaagagcctttctgtgcgaggatgagagccaatcgggaagaactggatctcctgccaccagttggaggaatggctgttgatgtgatggaagtagaactccctgcgacgcgccgagcattcatgcttgtgcttgtacagacggccgcagtagtcgcagcgttgcacgggttgtatctcgtgaatgagttgtacctggcttcccttgacgagaaatttcagtgggaagccgaggcctggcgattgtatctcgtgctttactatgttgtctgcatcggcctgttcatcttctgtctcgatggtggtcatgctgacgagccctcgcgggaggcaagtccagacctcggcgcggcaggggcggagctcgaggacgagagcgcgcaggctggagctgtccagggtcctgagacgctgcggactcaggttagtaggcagtgtcaggagattaacttgcatgatcttttggagggcgtgcgggaggttcagatagtacttgatctcaacgggtccgttggtggagatgtcgatggcttgcagggttccgtgtcccttgggcgctaccaccgtgcccttgtttttcattttggacggcggtggctctgttgcttcttgcatgtttagaagcggtgtcgagggcgcgcaccgggcggcaggggcggctcgggacccggcggcatggctggcagtggtacgtcggcgccgcgcgcgggtaggttctggtactgcgccctgagaagactcgcatgcgcgacgacgcggcggttgacatcctggatctgacgcctctgggtgaaagctaccggccccgtgagcttgaacctgaaagagagttcaacagaatcaatctcggtatcgttgacggcggcttgcctaaggatttcttgcacgtcaccagagttgtcctggtaggcgatctccgccatgaactgctcgatctcttcctcttgaagatctccgcggcccgctctctcgacggtggccgcgaggtcgttggagatgcgcccaatgagttgagagaatgcattcatgcccgcctcgttccagacgcggctgtagaccacggcccccacgggatctctcgcgcgcatgaccacctgggcgaggttgagctccacgtggcgggtgaagaccgcatagttgcataggcgctggaaaaggtagttgagtgtggtggcgatgtgctcggtgacgaagaaatacatgatccatcgtctcagcggcatctcgctgacatcgcccagagcttccaagcgctccatggcctcgtagaagtccacggcaaaattaaaaaactgggagtttcgcgcggacacggtcaactcctcttccagaagacggataagttcggcgatggtggtgcgcacctcgcgctcgaaagcccctgggatttcttcctcaatctcttcttcttccactaacatctcttcctcttcaggtggggctgcaggaggagggggaacgcggcgacgccggcggcgcacgggcagacggtcgatgaatctttcaatgacctctccgcggcggcggcgcatggtttcagtgacggcgcggccgttctcgcgcggtcgcagagtaaaaacaccgccgcgcatctccttaaagtggtgactgggaggttctccgtttgggagggagagggcgctgattatacattttattaattggcccgtagggactgcacgcagagatctgatcgtgtcaagatccacgggatctgaaaacctttcgacgaaagcgtctaaccagtcacagtcacaaggtaggctgagtacggcttcttgtgggcgggggtggttatgtgttcggtctgggtcttctgtttcttcttcatctcgggaaggtgagacgatgctgctggtgatgaaattaaagtaggcagttctaagacggcggatggtggcgaggagcaccaggtctttgggtccggcttgctggatacgcaggcgattggccattccccaagcattatcctgacatctagcaagatctttgtagtagtcttgcatgagccgttctacgggcacttcttcctcacccgttctgccatgcatacgtgtgagtccaaatccgcgcattggttgtaccagtgccaagtcagctacgactctttcggcgaggatggcttgctgtacttgggtaagggtggcttgaaagtcatcaaaatccacaaagcggtggtaagctcctgtattaatggtgtaagcacagttggccatgactgaccagttaactgtctggtgaccagggcgcacgagctcggtgtatttaaggcgcgaataggcgcgggtgtcaaagatgtaatcgttgcaggtgcgcaccagatactggtaccctataagaaaatgcggcggtggttggcggtagagaggccatcgttctgtagctggagcgccaggggcgaggtcttccaacataaggcggtgatagccgtagatgtacctggacatccaggtgattcctgcggcggtagtagaagcccgaggaaactcgcgtacgcggttccaaatgttgcgtagcggcatgaagtagttcattgtaggcacggtttgaccagtgaggcgcgcgcagtcattgatgctctatagacacggagaaaatgaaagcgttcagcgactcgactccgtagcctggaggaacgtgaacgggttgggtcgcggtgtaccccggttcgagacttgtactcgagccggccggagccgcggctaacgtggtattggcactcccgtctcgacccagcctacaaaaatccaggatacggaatcgagtcgttttgctggtttccgaatggcagggaagtgagtcctattttttttttttgccgctcagatgcatcccgtgctgcgacagatgcgcccccaacaacagcccccctcgcagcagcagcagcagcaatcacaaaaggctgtccctgcaactactgcaactgccgccgtgagcggtgcgggacagcccgcctatgatctggacttggaagagggcgaaggactggcacgtctaggtgcgccttcacccgagcggcatccgcgagttcaactgaaaaaagattctcgcgaggcgtatgtgccccaacagaacctatttagagacagaagcggcgaggagccggaggagatgcgagcttcccgctttaacgcgggtcgtgagctgcgtcacggtttggaccgaagacgagtgttgcgggacgaggatttcgaagttgatgaaatgacagggatcagtcctgccagggcacacgtggctgcagccaaccttgtatcggcttacgagcagacagtaaaggaagagcgtaacttccaaaagtcttttaataatcatgtgcgaaccctgattgcccgcgaagaagttacccttggtttgatgcatttgtgggatttgatggaagctatcattcagaaccctactagcaaacctctgaccgcccagctgtttctggtggtgcaacacagcagagacaatgaggctttcagagaggcgctgctgaacatcaccgaacccgaggggagatggttgtatgatcttatcaacattctacagagtatcatagtgcaggagcggagcctgggcctggccgagaaggtggctgccatcaattactcggttttgagcttgggaaaatattacgctcgcaaaatctacaagactccatacgttcccatagacaaggaggtgaagatagatgggttctacatgcgcatgacgctcaaggtcttgaccctgagcgatgatcttggggtgtatcgcaatgacagaatgcatcgcgcggttagcgccagcaggaggcgcgagttaagcgacagggaactgatgcacagtttgcaaagagctctgactggagctggaaccgagggtgagaattacttcgacatgggagctgacttgcagtggcagcctagtcgcagggctctgagcgccgcgacggcaggatgtgagcttccttacatagaagaggcggatgaaggcgaggaggaagagggcgagtacttggaagactgatggcacaacccgtgttttttgctagatggaacagcaagcaccggatcccgcaatgcgggcggcgctgcagagccagccgtccggcattaactcctcggacgattggacccaggccatgcaacgtatcatggcgttgacgactcgcaaccccgaagcctttagacagcaaccccaggccaaccgtctatcggccatcatggaagctgtagtgccttcccgctctaatcccactcatgagaaggtcctggccatcgtgaacgcgttggtggagaacaaagctattcgtccagatgaggccggactggtatacaacgctctcttagaacgcgtggctcgctacaacagtagcaatgtgcaaaccaatttggaccgtatgataacagatgtacgcgaagccgtgtctcagcgcgaaaggttccagcgtgatgccaacctgggttcgctggtggcgttaaatgctttcttgagtactcagcctgctaatgtgccgcgtggtcaacaggattatactaactttttaagtgctttgagactgatggtatcagaagtacctcagagcgaagtgtatcagtccggtcctgattacttctttcagactagcagacagggcttgcagacggtaaatctgagccaagcttttaaaaaccttaaaggtttgtggggagtgcatgccccggtaggagaaagagcaaccgtgtctagcttgttaactccgaactcccgcctattattactgttggtagctcctttcaccgacagcggtagcatcgaccgtaattcctatttgggttacctactaaacctgtatcgcgaagccatagggcaaagtcaggtggacgagcagacctatcaagaaattacccaagtcagtcgcgctttgggacaggaagacactggcagtttggaagccactctgaacttcttgcttaccaatcggtctcaaaagatccctcctcaatatgctcttactgcggaggaggagaggatccttagatatgtgcagcagagcgtgggattgtttctgatgcaagagggggcaactccgactgcagcactggacatgacagcgcgaaatatggagcccagcatgtatgccagtaaccgacctttcattaacaaactgctggactacttgcacagagctgccgctatgaactctgattatttcaccaatgccatcttaaacccgcactggctgcccccacctggtttctacacgggcgaatatgacatgcccgaccctaatgacggatttctgtgggacgacgtggacagcgatgttttttcacctctttctgatcatcgcacgtggaaaaaggaaggcggcgatagaatgcattcttctgcatcgctgtccggggtcatgggtgctaccgcggctgagcccgagtctgcaagtccttttcctagtctacccttttctctacacagtgtacgtagcagcgaagtgggtagaataagtcgcccgagtttaatgggcgaagaggagtatctaaacgattccttgctcagaccggcaagagaaaaaaatttcccaaacaatggaatagaaagtttggtggataaaatgagtagatggaagacttatgctcaggatcacagagacgagcctgggatcatggggattacaagtagagcgagccgtagacgccagcgccatgacagacagaggggtcttgtgtgggacgatgaggattcggccgatgatagcagcgtgctggacttgggtgggagaggaaggggcaacccgtttgctcatttgcgccctcgcttgggtggtatgttgtaaaaaaaaataaaaaaaaaactcaccaaggccatggcgacgagcgtacgttcgttcttctttattatctgtgtctagtataatgaggcgagtcgtgctaggcggagcggtggtgtatccggagggtcctcctccttcgtacgagagcgtgatgcagcagcagcaggcgacggcggtgatgcaatccccactggaggctccctttgtgcctccgcgatacctggcacctacggagggcagaaacagcattcgttattcggaactggcacctcagtacgataccaccaggttgtatctggtggacaacaagtcggcggacattgcttctctgaactatcagaatgaccacagcaacttcttgaccacggtggtgcaaaacaatgactttacccctacggaagccagcacccagaccattaactttgatgaacgatcgcggtggggcggtcagctaaagaccatcatgcatactaacatgccaaacgtgaacgagtatatgtttagtaacaagttcaaagcgcgtgtgatggtgtccagaaaacctcccgacggtgctgcagttggggatacttatgatcacaagcaggatattttgaaatatgagtggttcgagtttactttgccagaaggcaacttttcagttactatgactattgatttgatgaacaatgccatcatagataattacttgaaagtgggtagacagaatggagtgcttgaaagtgacattggtgttaagttcgacaccaggaacttcaagctgggatgggatcccgaaaccaagttgatcatgcctggagtgtatacgtatgaagccttccatcctgacattgtcttactgcctggctgcggagtggattttaccgagagtcgtttgagcaaccttcttggtatcagaaaaaaacagccatttcaagagggttttaagattttgtatgaagatttagaaggtggtaatattccggccctcttggatgtagatgcctatgagaacagtaagaaagaacaaaaagccaaaatagaagctgctacagctgctgcagaagctaaggcaaacatagttgccagcgactctacaagggttgctaacgctggagaggtcagaggagacaattttgcgccaacacctgttccgactgcagaatcattattggccgatgtgtctgaaggaacggacgtgaaactcactattcaacctgtagaaaaagatagtaagaatagaagctataatgtgttggaagacaaaatcaacacagcctatcgcagttggtatctttcgtacaattatggcgatcccgaaaaaggagtgcgttcctggacattgctcaccacctcagatgtcacctgcggagcagagcaggtctactggtcgcttccagacatgatgaaggatcctgtcactttccgctccactagacaagtcagtaactaccctgtggtgggtgcagagcttatgcccgtcttctcaaagagcttctacaacgaacaagctgtgtactcccagcagctccgccagtccacctcgcttacgcacgtcttcaaccgctttcctgagaaccagattttaatccgtccgccggcgcccaccattaccaccgtcagtgaaaacgttcctgctctcacagatcacgggaccctgccgttgcgcagcagtatccggggagtccaacgtgtgaccgttactgacgccagacgccgcacctgtccctacgtgtacaaggcactgggcatagtcgcaccgcgcgtcctttcaagccgcactttctaaaaaaaaaaaaaatgtccattcttatctcgcccagtaataacaccggttggggtctgcgcgctccaagcaagatgtacggaggcgcacgcaaacgttctacccaacatcctgtccgtgttcgcggacattttcgcgctccatggggcgccctcaagggccgcactcgcgttcgaaccaccgtcgatgatgtaatcgatcaggtggttgccgacgcccgtaattatactcctactgcgcctacatctactgtggatgcagttattgacagtgtagtggctgacgctcgcaactatgctcgacgtaagagccggcgaaggcgcattgccagacgccaccgagctaccactgccatgcgagccgcaagagctctgctacgaagagctagacgcgtggggcgaagagccatgcttagggcggccagacgtgcagcttcgggcgccagcgccggcaggtcccgcaggcaagcagccgctgtcgcagcggcgactattgccgacatggcccaatcgcgaagaggcaatgtatactgggtgcgtgacgctgccaccggtcaacgtgtacccgtgcgcacccgtccccctcgcacttagaagatactgagcagtctccgatgttgtgtcccagcggcgaggatgtccaagcgcaaatacaaggaagaaatgctgcaggttatcgcacctgaagtctacggccaaccgttgaaggatgaaaaaaaaccccgcaaaatcaagcgggttaaaaaggacaaaaaagaagaggaagatggcgatgatgggctggcggagtttgtgcgcgagtttgccccacggcgacgcgtgcaatggcgtgggcgcaaagttcgacatgtgttgagacctggaacttcggtggtctttacacccggcgagcgttcaagcgctacttttaagcgttcctatgatgaggtgtacggggatgatgatattcttgagcaggcggctgaccgattaggcgagtttgcttatggcaagcgtagtagaataacttccaaggatgagacagtgtcgatacccttggatcatggaaatcccacccctagtcttaaaccggtcactttgcagcaagtgttacccgtaactccgcgaacaggtgttaaacgcgaaggtgaagatttgtatcccactatgcaactgatggtacccaaacgccagaagttggaggacgttttggagaaagtaaaagtggatccagatattcaacctgaggttaaagtgagacccattaagcaggtagcgcctggtctgggggtacaaactgtagacattaagattcccactgaaagtatggaagtgcaaactgaacccgcaaagcctactgccacctccactgaagtgcaaacggatccatggatgcccatgcctattacaactgacgccgccggtcccactcgaagatcccgacgaaagtacggtccagcaagtctgttgatgcccaattatgttgtacacccatctattattcctactcctggttaccgaggcactcgctactatcgcagccgaaacagtacctcccgccgtcgccgcaagacacctgcaaatcgcagtcgtcgccgtagacgcacaagcaaaccgactcccggcgccctggtgcggcaagtgtaccgcaatggtagtgcggaacctttgacactgccgcgtgcgcgttaccatccgagtatcatcacttaatcaatgttgccgctgcctccttgcagatatggccctcacttgtcgccttcgcgttcccatcactggttaccgaggaagaaactcgcgccgtagaagagggatgttgggacgcggaatgcgacgctacaggcgacggcgtgctatccgcaagcaattgcggggtggttttttaccagccttaattccaattatcgctgctgcaattggcgcgataccaggcatagcttccgtggcggttcaggcctcgcaacgacattgacattggaaaaaaacgtataaataaaaaaaaaaaaatacaatggactctgacactcctggtcctgtgactatgttttcttagagatggaagacatcaatttttcatccttggctccgcgacacggcacgaagccgtacatgggcacctggagcgacatcggcacgagccaactgaacgggggcgccttcaattggagcagtatctggagcgggcttaaaaattttggctcaaccataaaaacatacgggaacaaagcttggaacagcagtacaggacaggcgcttagaaataaacttaaagaccagaacttccaacaaaaagtagtcgatgggatagcttccggcatcaatggagtggtagatttggctaaccaggctgtgcagaaaaagataaacagtcgtttggacccgccgccagcaaccccaggtgaaatgcaagtggaggaagaaattcctccgccagaaaaacgaggcgacaagcgtccgcgtcccgatttggaagagacgctggtgacgcgcgtagatgaaccgccttcttatgaggaagcaacgaagcttggaatgcccaccactagaccgatagccccaatggccaccggggtgatgaaaccttctcagttgcatcgacccgtcaccttggatttgccccctccccctgctgctactgctgtacccgcttctaagcctgtcgctgccccgaaaccagtcgccgtagccaggtcacgtcccgggggcgctcctcgtccaaatgcgcactggcaaaatactctgaacagcatcgtgggtctaggcgtgcaaagtgtaaaacgccgtcgctgcttttaattaaatatggagtagcgcttaacttgcctatctgtgtatatgtgtcattacacgccgtcacagcagcagaggaaaaaaggaagaggtcgtgcgtcgacgctgagttactttcaagatggccaccccatcgatgctgccccaatgggcatacatgcacatcgccggacaggatgcttcggagtacctgagtccgggtctggtgcagttcgcccgcgccacagacacctacttcaatctgggaaataagtttagaaatcccaccgtagcgccgacccacgatgtgaccaccgaccgtagccagcggctcatgttgcgcttcgtgcccgttgaccgggaggacaatacatactcttacaaagtgcggtacaccctggccgtgggcgacaacagagtgctggatatggccagcacgttctttgacattaggggtgtgttggacagaggtcccagtttcaaaccctattctggtacggcttacaactccctggctcctaaaggcgctccaaatacatctcagtggattgcagaaggtgtaaaaaatacaactggtgaggaacacgtaacagaagaggaaaccaatactactacttacacttttggcaatgctcctgtaaaagctgaagctgaaattacaaaagaaggactcccagtaggtttggaagtttcagatgaagaaagtaaaccgatttatgctgataaaacatatcagccagaacctcagctgggagatgaaacttggactgaccttgatggaaaaaccgaaaagtatggaggcagggctctcaaacccgatactaagatgaaaccatgctacgggtcctttgccaaacctactaatgtgaaaggcggtcaggcaaaacaaaaaacaacggagcagccaaatcagaaagtcgaatatgatatcgacatggagttttttgatgcggcatcgcagaaaacaaacttaagtcctaaaattgtcatgtatgcagaaaatgtaaatttggaaactccagacactcatgtagtgtacaaacctggaacagaagacacaagttccgaagctaatttgggacaacaatctatgcccaacagacccaactacattggcttcagagataactttattggacttatgtactataacagtactggtaacatgggggtgctggctggtcaagcgtctcagttaaatgcagtggttgacttgcaggacagaaacacagaactttcttaccaactcttgcttgactctctgggcgacagaaccagatactttagcatgtggaatcaggctgtggacagttatgatcctgatgtacgtgttattgaaaatcatggtgtggaagatgaacttcccaactactgttttccactggacggcataggtgttccaacaaccagttacaaatcaatagttccaaatggagacaatgcgcctaattggaaggaacctgaagtaaatggaacaagtgagatcggacagggtaatttgtttgccatggaaattaaccttcaagccaatctatggcgaagtttcctttattccaatgtggctctatatctcccagactcgtacaaatacaccccgtccaatgtcactcttccagaaaacaaaaacacctacgactacatgaacgggcgggtggtgccgccatctctagtagacacctatgtgaacattggtgccaggtggtctctggatgccatggacaatgtcaacccattcaaccaccaccgtaacgctggcttgcgttaccgatccatgcttctgggtaacggacgttatgtgcctttccacatacaagtgcctcaaaaattcttcgctgttaaaaacctgctgcttctcccaggctcctacacttatgagtggaactttaggaaggatgtgaacatggttctacagagttccctcggtaacgacctgcgggtagatggcgccagcatcagtttcacgagcatcaacctctatgctacttttttccccatggctcacaacaccgcttccacccttgaagccatgctgcggaatgacaccaatgatcagtcattcaacgactacctatctgcagctaacatgctctaccccattcctgccaatgcaaccaatattcccatttccattccttctcgcaactgggcggctttcagaggctggtcatttaccagactgaaaaccaaagaaactccctctttggggtctggatttgacccctactttgtctattctggttctattccctacctggatggtaccttctacctgaaccacacttttaagaaggtttccatcatgtttgactcttcagtgagctggcctggaaatgacaggttactatctcctaacgaatttgaaataaagcgcactgtggatggcgaaggctacaacgtagcccaatgcaacatgaccaaagactggttcttggtacagatgctcgccaactacaacatcggctatcagggcttctacattccagaaggatacaaagatcgcatgtattcatttttcagaaacttccagcccatgagcaggcaggtggttgatgaggtcaattacaaagacttcaaggccgtcgccataccctaccaacacaacaactctggctttgtgggttacatggctccgaccatgcgccaaggtcaaccctatcccgctaactatccctatccactcattggaacaactgccgtaaatagtgttacgcagaaaaagttcttgtgtgacagaaccatgtggcgcataccgttctcgagcaacttcatgtctatgggggcccttacagacttgggacagaatatgctctatgccaactcagctcatgctctggacatgacctttgaggtggatcccatggatgagcccaccctgctttatcttctcttcgaagttttcgacgtggtcagagtgcatcagccacaccgcggcatcatcgaggcagtctacctgcgtacaccgttctcggccggtaacgctaccacgtaagaagcttcttgcttcttgcaaatagcagctgcaaccatggcctgcggatcccaaaacggctccagcgagcaagagctcagagccattgtccaagacctgggttgcggaccctattttttgggaacctacgataagcgcttcccggggttcatggcccccgataagctcgcctgtgccattgtaaatacggccggacgtgagacggggggagagcactggttggctttcggttggaacccacgttctaacacctgctacctttttgatccttttggattctcggatgatcgtctcaaacagatttaccagtttgaatatgagggtctcctgcgccgcagcgctcttgctaccaaggaccgctgtattacgctggaaaaatctacccagaccgtgcagggtccccgttctgccgcctgcggacttttctgctgcatgttccttcacgcctttgtgcactggcctgaccgtcccatggacggaaaccccaccatgaaattgctaactggagtgccaaacaacatgcttcattctcctaaagtccagcccaccctgtgtgacaatcaaaaagcactctaccattttcttaatacccattcgccttattttcgctcccatcgtacacacatcgaaagggccactgcgttcgaccgtatggatgttcaataatgactcatgtaaacaacgtgttcaataaacatcactttatttttttacatgtatcaaggctctgcattacttatttatttacaagtcgaatgggttctgacgagaatcagaatgacccgcaggcagtgatacgttgcggaactgatacttgggttgccacttgaattcgggaatcaccaacttgggaaccggtatatcgggcaggatgtcactccacagctttctggtcagctgcaaagctccaagcaggtcaggagccgaaatcttgaaatcacaattaggaccagtgctttgagcgcgagagttgcggtacaccggattgcagcactgaaacaccatcagcgacggatgtctcacgcttgccagcacggtgggatctgcaatcatgcccacatccagatcttcagcattggcaatgctgaacggggtcatcttgcaggtctgcctacccatggcgggcacccaattaggcttgtggttgcaatcgcagtgcagggggatcagtatcatcttggcctgatcctgtctgattcctggatacacggctctcatgaaagcatcatattgcttgaaagcctgctgggctttactaccctcggtataaaacatcccgcaggacctgctcgaaaactggttagctgcacagccggcatcattcacacagcagcgggcgtcattgttagctatttgcaccacacttctgccccagcggttttgggtgattttggttcgctcgggattctcctttaaggctcgttgtccgttctcgctggccacatccatctcgataatctgctccttctgaatcataatattgccatgcaggcacttcagcttgccctcataatcattgcagccatgaggccacaacgcacagcctgtacattcccaattatggtgggcgatctgagaaaaagaatgtatcattccctgcagaaatcttcccatcatcgtgctcagtgtcttgtgactagtgaaagttaactggatgcctcggtgctcctcgtttacgtactggtgacagatgcgcttgtattgttcgtgttgctcaggcattagtttaaaagaggttctaagttcgttatccagcctgtacttctccatcagcagacacatcacttccatgcctttctcccaagcagacaccaggggcaagctaatcggattcttaacagtgcaggcagcagctcctttagccagagggtcatctttagcgatcttctcaatgcttcttttgccatccttctcaacgatgcgcacgggcgggtagctgaaacccactgctacaagttgcgcctcttctctttcttcttcgctgtcttgactgatgtcttgcatggggatatgtttggtcttccttggcttctttttggggggtatcggaggaggaggactgtcgctccgttccggagacagggaggattgtgacgtttcgctcaccattaccaactgactgtcggtagaagaacctgaccccacacggcgacaggtgtttctcttcgggggcagaggtggaggcgattgcgaagggctgcggtccgacctggaaggcggatgactggcagaaccccttccgcgttcgggggtgtgctccctgtggcggtcgcttaactgatttccttcgcggctggccattgtgttctcctaggcagagaaacaacagacatggaaactcagccattgctgtcaacatcgccacgagtgccatcacatctcgtcctcagcgacgaggaaaaggagcagagcttaagcattccaccgcccagtcctgccaccacctctaccctagaagataaggaggtcgacgcatctcatgacatgcagaataaaaaagcgaaagagtctgagacagacatcgagcaagacccgggctatgtgacaccggtggaacacgaggaagagttgaaacgctttctagagagagaggatgaaaactgcccaaaacaacgagcagataactatcaccaagatgctggaaatagggatcagaacaccgactacctcatagggcttgacggggaagacgcgctccttaaacatctagcaagacagtcgctcatagtcaaggatgcattattggacagaactgaagtgcccatcagtgtggaagagctcagccgcgcctacgagcttaacctcttttcacctcgtactccccccaaacgtcagccaaacggcacctgcgagccaaatcctcgcttaaacttttatccagcttttgctgtgccagaagtactggctacctatcacatcttttttaaaaatcaaaaaattccagtctcctgccgcgctaatcgcacccgcgccgatgccctactcaatctgggacctggttcacgcttacctgatatagcttccttggaagaggttccaaagatcttcgagggtctgggcaataatgagactcgggccgcaaatgctctgcaaaagggagaaaatggcatggatgagcatcacagcgttctggtggaattggaaggcgataatgccagactcgcagtactcaagcgaagcatcgaggtcacacacttcgcatatcccgctgtcaacctgccccctaaagtcatgacggcggtcatggaccagttactcattaagcgcgcaagtcccctttcagaagacatgcatgacccagatgcctgtgatgagggtaaaccagtggtcagtgatgagcagctaacccgatggctgggcaccgactctcccagggatttggaagagcgtcgcaagcttatgatggccgtggtgctggttaccgtagaactagagtgtctccgacgtttctttaccgattcagaaaccttgcgcaaactcgaagagaatctgcactacacttttagacacggctttgtgcggcaggcatgcaagatatctaacgtggaactcaccaacctggtttcctacatgggtattctgcatgagaatcgcctaggacaaagcgtgctgcacagcaccctgaagggggaagcccgccgtgattacatccgcgattgtgtctatctgtacctgtgccacacgtggcaaaccggcatgggtgtatggcagcaatgtttagaagaacagaacttgaaagagcttgacaagctcttacagaaatctcttaaggttctgtggacagggttcgacgagcgcaccgtcgcttccgacctggcagacctcatcttcccagagcgtctcagggttactttgcgaaacggattgcctgactttatgagccagagcatgcttaacaattttcgctctttcatcctggaacgctccggtatcctgcccgccacctgctgcgcactgccctccgactttgtgcctctcacctaccgcgagtgccccccgccgctatggagtcactgctacctgttccgtctggccaactatctctcctaccactcggatgtgatcgaggatgtgagcggagacggcttgctggagtgtcactgccgctgcaatctgtgcacgccccaccggtccctagcttgcaacccccagttgatgagcgaaacccagataataggcacctttgaattgcaaggccccagcagccaaggcgatgggtcttctcctgggcaaagtttaaaactgaccccgggactgtggacctccgcctacttgcgcaagtttgctccggaagattaccacccctatgaaatcaagttctatgaggaccaatcacagcctccaaaggccgaactttcggcctgcgtcatcacccagggggcaattctggcccaattgcaagccatccaaaaatcccgccaagaatttctactgaaaaagggtaagggggtctaccttgacccccagaccggcgaggaactcaacacaaggttccctcaggatgtcccaacgacgagaaaacaagaagttgaaggtgcagccgccgcccccagaagatatggaggaagattgggacagtcaggcagaggaggcggaggaggacagtctggaggacagtctggaggaagacagtttggaggaggaaaacgaggaggcagaggaggtggaagaagtaaccgccgacaaacagttatcctcggctgcggagacaagcaacagcgctaccatctccgctccgagtcgaggaacccggcggcgtcccagcagtagatgggacgagaccggacgcttcccgaacccaaccagcgcttccaagaccggtaagaaggatcggcagggatacaagtcctggcgggggcataagaatgccatcatctcctgcttgcatgagtgcgggggcaacatatccttcacgcggcgctacttgctattccaccatggggtgaactttccgcgcaatgttttgcattactaccgtcacctccacagcccctactatagccagcaaatcccggcagtctcgacagataaagacagcggcggcgacctccaacagaaaaccagcagcggcagttagaaaatacacaacaagtgcagcaacaggaggattaaagattacagccaacgagccagcgcaaacccgagagttaagaaatcggatctttccaaccctgtatgccatcttccagcagagtcggggtcaagagcaggaactgaaaataaaaaaccgatctctgcgttcgctcaccagaagttgtttgtatcacaagagcgaagatcaacttcagcgcactctcgaggacgccgaggctctcttcaacaagtactgcgcgctgactcttaaagagtaggcagcgaccgcgcttattcaaaaaaggcgggaattacatcatcctcgacatgagtaaagaaattcccacgccttacatgtggagttatcaaccccaaatgggattggcggcaggcgcctcccaggactactccacccgcatgaattggctcagcgccgggccttctatgatttctcgagttaatgatatacgcgcctaccgaaaccaaatacttttggaacagtcagctcttaccaccacgccccgccaacaccttaatcccagaaattggcccgccgccctagtgtaccaggaaagtcccgctcccaccactgtattacttcctcgagacgcccaggccgaagtccaaatgactaatgcaggtgcgcagttagctggcggctccaccctatgtcgtcacaggcctcggcataatataaaacgcctgatgatcagaggccgaggtatccagctcaacgacgagtcggtgagctctccgcttggtctacgaccagacggaatctttcagattgccggctgcgggagatcttccttcacccctcgtcaggctgttctgactttggaaagttcgtcttcgcaaccccgctcgggcggaatcgggaccgttcaatttgtggaggagtttactccctctgtctacttcaaccccttctccggatctcctgggcattacccggacgagttcataccgaacttcgacgcgattagcgagtcagtggacggctacgattgatgtctggtgacgcggctgagctatctcggctgcgacatctagaccactgccgccgctttcgctgctttgcccgggaactcattgagttcatctacttcgaactccccaaggatcaccctcaaggtccggcccacggagtgcggatttctatcgaaggcaaaatagactctcgcctgcaacgaattttctcccagcggcccgtgctgatcgagcgagaccagggaaacaccacggtttccatctactgcatttgtaatcaccccggattgcatgaaagcctttgctgtcttatgtgtactgagtttaataaaaactgaattaagactctcctacggactgccgcttcttcaacccggattttacaaccagaagaacgaaacttttcctgtcgtccaggactctgttaacttcacctttcctactcacaaactagaagctcaacgactacaccgcttttccagaagcattttccctactaatactactttcaaaaccggaggtgagctccaaggtcttcctacagaaaacccttgggtggaagcgggccttgtagtgctaggaattcttgcgggtgggcttgtgattattctttgctacctatacacaccttgcttcactttcttagtggtgttgtggtattggtttaaaaaatggggcccatactagtcttgcttgttttactttcgcttttggaaccgggttctgccaattacgatccatgtctagacttcgacccagaaaactgcacacttacttttgcacccgacacaagccgcatctgtggagttcatcgcctctcttacgaacttggcccccaacgacaaaaatttacctgcatggtgggaatcaaccccatagttatcacccagcaaagtggagatactaagggttgcattcactgctcctgcgattccatcgagtgcacctacaccctgctgaagaccctatgcggcctaagagacctgctaccaatgaattaaaaaatgattaataaaaaatcacttacttgaaatcagcaataaggtctctgttgaaattttctcccagcagcacctcacttccctcttcccaactctggtattctaaaccccgttcagcggcatactttctccatactttaaaggggatgtcaaattttagctcctctcctgtacccacaatcttcatgtctttcttcccagatgaccaagagagtccggctcagtgactccttcaaccctgtctacccctatgaagatgaaagcacctcccaacacccctttataaacccagggtttatttccccaaatggcttcacacaaagcccaaacggagttcttactttaaaatgtttaaccccactaacaaccacaggcggatctctacagctaaaagtgggagggggacttacagtggatgacaccaacggttttttgaaagaaaacataagtgccaccacaccactcgttaagactggtcactctataggtttaccactaggagccggattgggaacgaatgaaaataaactttgtatcaaattaggacaaggacttacattcaattcaaacaacatttgcattgatgacaatattaacaccttatggacaggagtcaaccccaccgaagccaactgtcaaatcatgaactccagtgaatctaatgattgcaaattaattctaacactagttaaaactggagcactagtcactgcatttgtttatgttataggagtatctaacaattttaatatgctaactacacacagaaatataaattttactgcagagctgtttttcgattctactggtaatttactaactagactctcatccctcaaaactccacttaatcataaatcaggacaaaacatggctactggtgccattactaatgctaaaggtttcatgcccagcacgactgcctatcctttcaatgataattctagagaaaaagaaaactacatttacggaacttgttactacacagctagtgatcgcactgcttttcccattgacatatctgtcatgcttaaccgaagagcaataaatgacgagacatcatattgtattcgtataacttggtcctggaacacaggagatgccccagaggtgcaaacctctgctacaaccctagtcacctccccatttaccttttactacatcagagaagacgactgacaaataaagtttgcgatcgccaggcccaccatgtgccaccaacagctggtgatcagctggttctccctcgtgttcctcgcttcccctctggtggccatctgggagctgaagaaggacgtctacgtggtcgagctggactggtaccccgatgcccccggcgagatggtggtgctcacatgcgacacccccgaggaggatggcatcacatggacactggatcaaagctccgaagtgctgggctccggcaagaccctcaccattcaagtgaaggagttcggagacgccggccaatacacatgccacaaaggcggagaggtgctgtcccactctctgctgctgctgcataagaaggaggacggcatttggtccaccgacattctgaaagaccagaaggagcctaaaaataaaacctttctgagatgcgaggccaagaactactccggaagattcacatgctggtggctgaccacaatctccacagacctcaccttttccgtgaaatcctctagaggaagcagcgatcctcaaggagtgacatgcggcgctgctacactcagcgccgaaagagtgagaggagataacaaggagtacgagtacagcgtggagtgccaagaggattccgcttgtcccgctgccgaagagtccctccccattgaagtgatggtggacgccgtgcataaactgaaatacgagaattacacctccagcttttttattagagacattattaaacccgacccccccaaaaacctccagctcaagcccctcaaaaatagcagacaagtggaggtgagctgggagtatcccgatacatggagcaccccccacagctatttctccctcaccttctgtgtgcaagtgcaaggcaaatccaagagggagaagaaggatagagtgttcaccgacaaaaccagcgccaccgtcatctgcagaaaaaacgctagcatcagcgtcagagcccaagatagatattactcctccagctggtccgagtgggccagcgtcccttgttccggaggcggaggatccggaggaggaggaagcggcggaggaggctccagaaacctccccgtggctacacccgaccccggaatgtttccttgcctccaccactcccaaaatctgctcagagccgtgtccaacatgctccagaaggccagacaaacactggaattctacccttgcacctccgaggaaatcgatcacgaggacatcaccaaggacaagacaagcaccgtggaagcttgtctgcctctggaactcaccaagaacgagagctgtctgaactctagagaaacaagcttcattacaaacggcagctgtctggccagcagaaagacaagcttcatgatggctctgtgtctgtccagcatctacgaggatctgaagatgtaccaagtggagtttaaaaccatgaacgctaagctgctgatggaccctaagaggcagattttcctcgaccagaacatgctggccgtgattgacgaactgatgcaagctctgaacttcaacagcgagacagtgcctcaaaagtccagcctcgaggagcccgacttctacaagaccaagatcaagctgtgcattctgctgcatgccttcagaatcagagccgtcaccatcgatagagtcatgagctatctgaacgctagcggaagcggagagggaaggggaagcctcctcacatgtggcgatgtggaagaaaaccccggacccgctcaatctctggctctgtctctgctgattctggtgctggctttcggcatccccagaacacaaggcagcgatggcggcgctcaagactgctgtctgaagtacagccagaggaagatccccgccaaggtcgtgaggagctatagaaaacaagagccttctctgggatgttccattcccgccattctgttcctccccagaaagagatcccaagccgaactgtgtgccgaccccaaggagctgtgggtgcagcagctgatgcagcatctggacaagaccccttcccctcagaagcccgctcaaggctgcagaaaagataggggagccagcaagaccggcaagaagggaaagggatccaagggctgtaagagaaccgaaaggagccagacacccaagggacccggcagcggacagtgtacaaactacgctctgctgaagctggccggagacgtggaaagcaaccccggccccgcccctaggagagctagaggctgtagaacactgggactgcccgctctgctgctgctgctgctgctgagaccccccgccacaaggggaattacatgccctccccctatgtccgtcgagcacgccgacatctgggtgaagagctactccctctactctagagagaggtatatctgtaatagcggctttaagaggaaggccggaaccagctctctgaccgaatgcgtgctgaataaggctacaaacgtggcccactggacaacccccagcctcaagtgtattagggacggctccggcgctaccaatttctctctgctgaagcaagctggcgacgtcgaagaaaatcccggacccgactggacatggaggattctgtttctggtggctgctgccaccggagctcatagcaactgggtgaacgtcattagcgatctgaagaagattgaggatctgatccagtccatgcacatcgacgccacactctataccgagagcgatgtgcaccccagctgcaaggtgaccgccatgaaatgctttctgctggaactgcaagtgatctctctggagtccggcgacgccagcatccatgataccgtggagaatctgatcattctcgccaacaactctctgagcagcaacggcaatgtgacagaatccggctgcaaggagtgtgaagagctcgaggaaaagaatatcaaggagtttctgcagtccttcgtgcacatcgtccaaatgttcatcaatacaagctgagctagcttgactgactgagatacagcgtaccttcagctcacagacatgataagatacattgatgagtttggacaaaccacaactagaatgcagtgaaaaaaatgctttatttgtgaaatttgtgatgctattgctttatttgtaaccattataagctgcaataaacaagttaacaacaacaattgcattcattttatgtttcaggttcagggggaggtgtgggaggttttttaaagcaagtaaaacctctacaaatgtggtagtcgtcagctatcctgcaggaacttgtttatttgaaaatcaattcacaaaatccgagtagttattttgcctcccccttcccatttaacagaatacaccaatctctccccacgcacagctttaaacatttggataccattagatatagacatggttttagattccacattccaaacagtttcagagcgagccaatctggggtcagtgatagataaaaatccatcgggatagtcttttaaagcgctttcacagtccaactgctgcggatgcgactccggagtctggatcacggtcatctggaagaagaacgatgggaatcataatccgaaaacggtatcggacgattgtgtctcatcaaacccacaagcagccgctgtctgcgtcgctccgtgcgactgctgtttatgggatcagggtccacagtgtcctgaagcatgattttaatagcccttaacatcaactttctggtgcgatgcgcgcagcaacgcattctgatttcactcaaatctttgcagtaggtacaacacattattacaatattgtttaataaaccataattaaaagcgctccagccaaaactcatatctgatataatcgcccctgcatgaccatcataccaaagtttaatataaattaaatgacgttccctcaaaaacacactacccacatacatgatctcttttggcatgtgcatattaacaatctgtctgtaccatggacaacgttggttaatcatgcaacccaatataaccttccggaaccacactgccaacaccgctcccccagccatgcattgaagtgaaccctgctgattacaatgacaatgaagaacccaattctctcgaccgtgaatcacttgagaatgaaaaatatctatagtggcacaacatagacataaatgcatgcatcttctcataatttttaactcctcaggatttagaaacatatcccagggaataggaagctcttgcagaacagtaaagctggcagaacaaggaagaccacgaacacaacttacactatgcatagtcatagtatcacaatctggcaacagcgggtggtcttcagtcatagaagctcgggtttcattttcctcacaacgtggtaactgggctctggtgtaagggtgatgtctggcgcatgatgtcgagcgtgcgcgcaaccttgtcataatggagttgcttcctgacattctcgtattttgtatagcaaaacgcggccctggcagaacacactcttcttcgccttctatcctgccgcttagcgtgttccgtgtgatagttcaagtacaaccacactcttaagttggtcaaaagaatgctggcttcagttgtaatcaaaactccatcgcatctaatcgttctgaggaaatcatccaagcaatgcaactggattgtgtttcaagcaggagaggagagggaagagacggaagaaccatgttaatttttattccaaacgatctcgcagtacttcaaattgtagatcgcgcagatggcatctctcgcccccactgtgttggtgaaaaagcacagctagatcaaaagaaatgcgattttcaaggtgctcaacggtggcttccagcaaagcctccacgcgcacatccaagaacaaaagaataccaaaagaaggagcattttctaactcctcaatcatcatattacattcctgcaccattcccagataattttcagctttccagccttgaattattcgtgtcagttcttgtggtaaatccaatccacacattacaaacaggtcccggagggcgccctccaccaccattcttaaacacaccctcataatgacaaaatatcttgctcctgtgtcacctgtagcgaattgagaatggcaacatcaattgacatgcccttggctctaagttcttctttaagttctagttgtaaaaactctctcatattatcaccaaactgcttagccagaagccccccgggaacaagagcaggggacgctacagtgcagtacaagcgcagacctccccaattggctccagcaaaaacaagattggaataagcatattgggaaccgccagtaatatcatcgaagttgctggaaatataatcaggcagagtttcttgtaaaaattgaataaaagaaaaatttgccaaaaaaacattcaaaacctctgggatgcaaatgcaataggttaccgcgctgcgctccaacattgttagttttgaattagtctgcaaaaataaaaaaaaaaacaagcgtcatatcatagtagcctgacgaacagatggataaatcagtctttccatcacaagacaagccacagggtctccagctcgaccctcgtaaaacctgtcatcatgattaaacaacagcaccgaaagttcctcgcggtgaccagcatgaataattcttgatgaagcatacaatccagacatgttagcatcagttaacgagaaaaaacagccaacatagcctttgggtataattatgcttaatcgtaagtatagcaaagccacccctcgcggatacaaagtaaaaggcacaggagaataaaaaatataattatttctctgctgctgttcaggcaacgtcgcccccggtccctctaaatacacatacaaagcctcatcagccatggcttaccagacaaagtacagcgggcacacaaagcacaagctctaaagtgactctccaacctctccacaatatatatatacacaagccctaaactgacgtaatgggagtaaagtgtaaaaaatcccgccaaacccaacacacaccccgaaactgcgtcaccagggaaaagtacagtttcacttccgcaatcccaacaggcgtaacttcctctttctcacggtacgtgatatcccactaacttgcaacgtcattttcccacggtcgcaccgccccttttagccgttaaccccacagccaatcaccacacgatccacactttttaaaatcacctcatttacatattggcaccattccatctataaggtatattatatagataga

SEQ ID NO: 232 - DNA, 35530 bp, Artificial Sequence
  Genome sequence of NG-799A virus
tctatctatataatataccttatagatggaatggtgccaatatgtaaatgaggtgattttaaaaagtgtggatcgtgtggtgattggctgtggggttaacggctaaaaggggcggtgcgaccgtgggaaaatgacgttttgtgggggtggagtttttttgcaagttgtcgcgggaaatgtgacgcataaaaaggcttttttctcacggaactacttagttttcccacggtatttaacaggaaatgaggtagttttgaccggatgcaagtgaaaattgttgattttcgcgcgaaaactgaatgaggaagtgtttttctgaataatgtggtatttatggcagggtggagtatttgttcagggccaggtagactttgacccattacgtggaggtttcgattaccgtgttttttacctgaatttccgcgtaccgtgtcaaagtcttctgtttttacgtaggtgtcagctgatcgctagggtatttatacctcagggtttgtgtcaagaggccactcttgagtgccagcgagaagagttttctcctctgcgccggcagtttaataataaaaaaatgagagatttgcgatttctgcctcaggaaataatctctgctgagactggaaatgaaatattggagcttgtggtgcacgccctgatgggagacgatccggagccacctgtgcagctttttgagcctcctacgcttcaggaactgtatgatttagaggtagagggatcggaggattctaatgaggaagctgtaaatggcttttttaccgattctatgcttttagctgctaatgaagggttagaattagatccgcctttggacacttttgatactccaggggtaattgtggaaagcggtacaggtgtaagaaaattacctgatttgagttccgtggactgtgatttgcactgctatgaagacgggtttcctccgagtgatgaggaggaccatgaaaaggagcagtccatgcagactgcagcgggtgagggagtgaaggctgccaatgttggttttcagttggattgcccggagcttcctggacatggctgtaagtcttgtgaatttcacaggaaaaatactggagtaaaggaactgttatgttcgctttgttatatgagaacgcactgccactttatttacagtaagtgtgtttaagttaaaatttaaaggaatatgctgtttttcacatgtatattgagtgtgagttttgtgcttcttattataggtcctgtgtctgatgctgatgaatcaccatctcctgattctactacctcacctcctgagattcaagcacctgttcctgtggacgtgcgcaagcccattcctgtgaagcttaagcctgggaaacgtccagcagtggaaaaacttgaggacttgttacagggtggggacggacctttggacttgagtacacggaaacgtccaagacaataagtgttccatatccgtgtttacttaaggtgacgtcaatatttgtgtgacagtgcaatgtaataaaaatatgttaactgttcactggtttttattgctttttgggcggggactcaggtatataagtagaagcagacctgtgtggttagctcataggagctggctttcatccatggaggtttgggccattttggaagaccttaggaagactaggcaactgttagagaacgcttcggacggagtctccggtttttggagattctggttcgctagtgaattagctagggtagtttttaggataaaacaggactataaacaagaatttgaaaagttgttggtagattgcccaggactttttgaagctcttaatttgggccatcaggttcactttaaagaaaaagttttatcagttttagacttttcaaccccaggtagaactgctgctgctgtggcttttcttacttttatattagataaatggatcccgcagactcatttcagcaggggatacgttttggatttcatagccacagcattgtggagaacatggaaggttcgcaagatgaggacaatcttaggttactggccagtgcagcctttgggtgtagcgggaatcctgaggcatccaccggtcatgccagcggttctggaggaggaacagcaagaggacaacccgagagccggcctggaccctccagtggaggaggcggagtagctgacttgtctcctgaactgcaacgggtgcttactggatctacgtccactggacgggataggggcgttaagagggagagggcatctagtggtactgatgctagatctgagttggctttaagtttaatgagtcgcagacgtcctgaaaccatttggtggcatgaggttcagaaagagggaagggatgaagtttctgtattgcaggagaaatattcactggaacaggtgaaaacatgttggttggagcctgaggatgattgggaggtggccattaaaaattatgccaagatagctttgaggcctgataaacagtataagattactagacggattaatatccggaatgcttgttacatatctggaaatggggctgaggtggtaatagatactcaagacaaggcagttattagatgctgcatgatggatatgtggcctggggtagtcggtatggaagcagtaacttttgtaaatgttaagtttaggggagatggttataatggaatagtgtttatggccaataccaaacttatattgcatggttgtagcttttttggtttcaacaatacctgtgtagatgcctggggacaggttagtgtacggggatgtagtttctatgcgtgttggattgccacagctggcagaaccaagagtcaattgtctctgaagaaatgcatatttcaaagatgtaacctgggcattctgaatgaaggcgaagcaagggtccgccactgcgcttctacagatactggatgttttattttgattaagggaaatgccagcgtaaagcataacatgatttgcggtgcttccgatgagaggccttatcaaatgctcacttgtgctggtgggcattgtaatatgctggctactgtgcatattgtttcccatcaacgcaaaaaatggcctgtttttgatcacaatgtgatgacgaagtgtaccatgcatgcaggtgggcgtagaggaatgtttatgccttaccagtgtaacatgaatcatgtgaaagtgttgttggaaccagatgccttttccagaatgagcctaacaggaatttttgacatgaacatgcaaatctggaagatcctgaggtatgatgatacgagatcgagggtacgcgcatgcgaatgcggaggcaagcatgccaggttccagccggtgtgtgtagatgtgactgaagatctcagaccggatcatttggttattgcccgcactggagcagagttcggatccagtggagaagaaactgactaaggtgagtattgggaaaactttggggtgggattttcagatggacagattgagtaaaaatttgttttttctgtcttgcagctgtcatgagtggaaacgcttcttttaaggggggagtcttcagcccttatctgacagggcgtctcccatcctgggcaggagttcgtcagaatgttatgggatctactgtggatggaagacccgtccaacccgccaattcttcaacgctgacctatgctactttaagttcttcacctttggacgcagctgcagctgccgccgccgcttctgttgccgctaacactgtgcttggaatgggttactatggaagcatcatggctaattccacttcctctaataacccttctaccctgactcaggacaagttacttgtccttttggcccagctggaggctttgacccaacgtctgggtgaactttctcagcaggtggtcgagttgcgagtacaaactgagtctgctgtcggcacggcaaagtctaaataaaaaaatcccagaatcaatgaataaataaacaagcttgttgttgatttaaaatcaagtgtttttatttcatttttcgcgcacggtatgccctagaccaccgatctctatcattgagaactcggtggattttttccaggatcctatagaggtgggattgaatgtttagatacatgggcattaggccgtctttggggtggagatagctccattgaagggattcatgctccggggtagtgttgtaaatcacccagtcataacaaggtcgcagtgcatggtgttgcacaatatcttttagaagtaggctgattgccacagataagcccttggtgtaggtgtttacaaaccggttgagctgggatgggtgcattcggggtgaaattatgtgcattttggattggatttttaagttggcaatattgccgccaagatcccgtcttgggttcatgttatgaaggaccaccaagacggtgtatccggtacatttaggaaatttatcgtgcagcttggatggaaaagcgtggaaaaatttggagacacccttgtgtcctccaagattttccatgcactcatccatgataatagcaatggggccgtgggcagcggcgcgggcaaacacgttccgtgggtctgacacatcatagttatgttcctgagttaaatcatcataagccattttaatgaatttggggcggagagtaccagattggggtatgaatgttccttcgggccccggagcatagttcccctcacagatttgcatttcccaagctttcagttccgagggtggaatcatgtccacctggggggctatgaaaaacaccgtttctggggcgggggtgattaattgtgatgatagcaaatttctgagcaattgagatttgccacatccggtggggccataaatgattccgattacgggttgcaggtggtagtttagggaacggcaactgccgtcttctcgaagcaagggggccacctcgttcatcatttcccttacatgcatattttcccgcaccaaatccattaggaggcgctctcctcctagtgatagaagttcttgtagtgaggaaaagtttttcagcggtttcagaccgtcagccatgggcattttggagagagtttgctgcaaaagttctagtctgttccacagttcagtgatgtgttctatggcatctcgatccagcagacctcctcgtttcgcgggtttggacggctcctggaatagggtatgagacgatgggcgtccagcgctgccagggttcggtccttccagggtctcagtgttcgagtcagggttgtttccgtcacagtgaaggggtgtgcgcctgcttgggcgcttgccagggtgcgcttcagactcatcctgctggtcgaaaacttctgtcgcttggcgccctgtatgtcggccaagtagcagtttaccatgagttcgtagttgagcgcctcggctgcgtggcctttggcgcggagcttacctttggaagttttcttgcataccgggcagtataggcatttcagcgcatacaacttgggcgcaaggaaaacggattctggggagtatgcatctgcgccgcaggaggcgcaaacagtttcacattccaccagccaggttaaatccggttcattggggtcaaaaacaagttttccgccatattttttgatgcgtttcttacctttggtctccatgagttcgtgtcctcgttgagtgacaaacaggctgtccgtgtccccgtagactgattttacaggcctcttctccagtggagtgcctcggtcttcttcgtacaggaactctgaccactctgatacaaaggcgcgcgtccaggccagcacaaaggaggctatgtgggaggggtagcgatcgttgtcaaccagggggtccaccttttccaaagtatgcaaacacatgtcaccctcttcaacatccaggaatgtgattggcttgtaggtgtatttcacgtgacctggggtccccgctgggggggtataaaagggggcggttctttgctcttcctcactgtcttccggatcgctgtccaggaacgtcagctgttggggtaggtattccctctcgaaggcgggcatgacctctgcactcaggttgtcagtttctaagaacgaggaggatttgatattgacagtgccggttgagatgcctttcatgaggttttcgtccatctggtcagaaaacacaatttttttattgtcaagtttggtggcaaatgatccatacagggcgttggataaaagtttggcaatggatcgcatggtttggttcttttccttgtccgcgcgctctttggcggcgatgttgagttggacatactcgcgtgccaggcacttccattcggggaagatagttgttaattcatctggcacgattctcacttgccaccctcgattatgcaaggtaattaaatccacactggtggccacctcgcctcgaaggggttcattggtccaacagagcctacctcctttcctagaacagaaagggggaagtgggtctagcataagttcatcgggagggtctgcatccatggtaaagattcccggaagtaaatccttatcaaaatagctgatgggagtggggtcatctaaggccatttgccattctcgagctgccagtgcgcgctcatatgggttaaggggactgccccatggcatgggatgggtgagtgcagaggcatacatgccacagatgtcatagacgtagatgggatcctcaaagatgcctatgtaggttggatagcatcgcccccctctgatacttgctcgcacatagtcatatagttcatgtgatggcgctagcagccccggacccaagttggtgcgattgggtttttctgttctgtagacgatctggcgaaagatggcgtgagaattggaagagatggtgggtctttgaaaaatgttgaaatgggcatgaggtagacctacagagtctctgacaaagtgggcataagattcttgaagcttggttaccagttcggcggtgacaagtacgtctagggcgcagtagtcaagtgtttcttgaatgatgtcataacctggttggtttttcttttcccacagttcgcggttgagaaggtattcttcgcgatccttccagtactcttctagcggaaacccgtctttgtctgcacggtaagatcctagcatgtagaactgattaactgccttgtaagggcagcagcccttctctacgggtagagagtatgcttgagcagcttttcgtagcgaagcgtgagtaagggcaaaggtgtctctgaccatgactttgaggaattggtatttgaagtcgatgtcgtcacaggctccctgttcccagagttggaagtctacccgtttcttgtaggcggggttgggcaaagcgaaagtaacatcattgaagagaatcttgccggccctgggcatgaaattgcgagtgatgcgaaaaggctgtggtacttccgctcggttattgataacctgggcagctaggacgatctcgtcgaaaccgttgatgttgtgtcctacgatgtataattctatgaaacgcggcgtgcctctgacgtgaggtagcttactgagctcatcaaaggttaggtctgtggggtcagataaggcgtagtgttcgagagcccattcgtgcaggtgaggattcgctttaaggaaggaggaccagaggtccactgccagtgctgtttgtaactggtcccggtactgacgaaaatgccgtccgactgccattttttctggggtgacgcaatagaaggtttgggggtcctgccgccagcgatcccacttgagttttatggcgaggtcataggcgatgttgacgagccgctggtctccagagagtttcatgaccagcatgaaggggattagctgcttgccaaaggaccccatccaggtgtaggtttccacatcgtaggtgagaaagagcctttctgtgcgaggatgagagccaatcgggaagaactggatctcctgccaccagttggaggaatggctgttgatgtgatggaagtagaactccctgcgacgcgccgagcattcatgcttgtgcttgtacagacggccgcagtagtcgcagcgttgcacgggttgtatctcgtgaatgagttgtacctggcttcccttgacgagaaatttcagtgggaagccgaggcctggcgattgtatctcgtgctttactatgttgtctgcatcggcctgttcatcttctgtctcgatggtggtcatgctgacgagccctcgcgggaggcaagtccagacctcggcgcggcaggggcggagctcgaggacgagagcgcgcaggctggagctgtccagggtcctgagacgctgcggactcaggttagtaggcagtgtcaggagattaacttgcatgatcttttggagggcgtgcgggaggttcagatagtacttgatctcaacgggtccgttggtggagatgtcgatggcttgcagggttccgtgtcccttgggcgctaccaccgtgcccttgtttttcattttggacggcggtggctctgttgcttcttgcatgtttagaagcggtgtcgagggcgcgcaccgggcggcaggggcggctcgggacccggcggcatggctggcagtggtacgtcggcgccgcgcgcgggtaggttctggtactgcgccctgagaagactcgcatgcgcgacgacgcggcggttgacatcctggatctgacgcctctgggtgaaagctaccggccccgtgagcttgaacctgaaagagagttcaacagaatcaatctcggtatcgttgacggcggcttgcctaaggatttcttgcacgtcaccagagttgtcctggtaggcgatctccgccatgaactgctcgatctcttcctcttgaagatctccgcggcccgctctctcgacggtggccgcgaggtcgttggagatgcgcccaatgagttgagagaatgcattcatgcccgcctcgttccagacgcggctgtagaccacggcccccacgggatctctcgcgcgcatgaccacctgggcgaggttgagctccacgtggcgggtgaagaccgcatagttgcataggcgctggaaaaggtagttgagtgtggtggcgatgtgctcggtgacgaagaaatacatgatccatcgtctcagcggcatctcgctgacatcgcccagagcttccaagcgctccatggcctcgtagaagtccacggcaaaattaaaaaactgggagtttcgcgcggacacggtcaactcctcttccagaagacggataagttcggcgatggtggtgcgcacctcgcgctcgaaagcccctgggatttcttcctcaatctcttcttcttccactaacatctcttcctcttcaggtggggctgcaggaggagggggaacgcggcgacgccggcggcgcacgggcagacggtcgatgaatctttcaatgacctctccgcggcggcggcgcatggtttcagtgacggcgcggccgttctcgcgcggtcgcagagtaaaaacaccgccgcgcatctccttaaagtggtgactgggaggttctccgtttgggagggagagggcgctgattatacattttattaattggcccgtagggactgcacgcagagatctgatcgtgtcaagatccacgggatctgaaaacctttcgacgaaagcgtctaaccagtcacagtcacaaggtaggctgagtacggcttcttgtgggcgggggtggttatgtgttcggtctgggtcttctgtttcttcttcatctcgggaaggtgagacgatgctgctggtgatgaaattaaagtaggcagttctaagacggcggatggtggcgaggagcaccaggtctttgggtccggcttgctggatacgcaggcgattggccattccccaagcattatcctgacatctagcaagatctttgtagtagtcttgcatgagccgttctacgggcacttcttcctcacccgttctgccatgcatacgtgtgagtccaaatccgcgcattggttgtaccagtgccaagtcagctacgactctttcggcgaggatggcttgctgtacttgggtaagggtggcttgaaagtcatcaaaatccacaaagcggtggtaagctcctgtattaatggtgtaagcacagttggccatgactgaccagttaactgtctggtgaccagggcgcacgagctcggtgtatttaaggcgcgaataggcgcgggtgtcaaagatgtaatcgttgcaggtgcgcaccagatactggtaccctataagaaaatgcggcggtggttggcggtagagaggccatcgttctgtagctggagcgccaggggcgaggtcttccaacataaggcggtgatagccgtagatgtacctggacatccaggtgattcctgcggcggtagtagaagcccgaggaaactcgcgtacgcggttccaaatgttgcgtagcggcatgaagtagttcattgtaggcacggtttgaccagtgaggcgcgcgcagtcattgatgctctatagacacggagaaaatgaaagcgttcagcgactcgactccgtagcctggaggaacgtgaacgggttgggtcgcggtgtaccccggttcgagacttgtactcgagccggccggagccgcggctaacgtggtattggcactcccgtctcgacccagcctacaaaaatccaggatacggaatcgagtcgttttgctggtttccgaatggcagggaagtgagtcctattttttttttttgccgctcagatgcatcccgtgctgcgacagatgcgcccccaacaacagcccccctcgcagcagcagcagcagcaatcacaaaaggctgtccctgcaactactgcaactgccgccgtgagcggtgcgggacagcccgcctatgatctggacttggaagagggcgaaggactggcacgtctaggtgcgccttcacccgagcggcatccgcgagttcaactgaaaaaagattctcgcgaggcgtatgtgccccaacagaacctatttagagacagaagcggcgaggagccggaggagatgcgagcttcccgctttaacgcgggtcgtgagctgcgtcacggtttggaccgaagacgagtgttgcgggacgaggatttcgaagttgatgaaatgacagggatcagtcctgccagggcacacgtggctgcagccaaccttgtatcggcttacgagcagacagtaaaggaagagcgtaacttccaaaagtcttttaataatcatgtgcgaaccctgattgcccgcgaagaagttacccttggtttgatgcatttgtgggatttgatggaagctatcattcagaaccctactagcaaacctctgaccgcccagctgtttctggtggtgcaacacagcagagacaatgaggctttcagagaggcgctgctgaacatcaccgaacccgaggggagatggttgtatgatcttatcaacattctacagagtatcatagtgcaggagcggagcctgggcctggccgagaaggtggctgccatcaattactcggttttgagcttgggaaaatattacgctcgcaaaatctacaagactccatacgttcccatagacaaggaggtgaagatagatgggttctacatgcgcatgacgctcaaggtcttgaccctgagcgatgatcttggggtgtatcgcaatgacagaatgcatcgcgcggttagcgccagcaggaggcgcgagttaagcgacagggaactgatgcacagtttgcaaagagctctgactggagctggaaccgagggtgagaattacttcgacatgggagctgacttgcagtggcagcctagtcgcagggctctgagcgccgcgacggcaggatgtgagcttccttacatagaagaggcggatgaaggcgaggaggaagagggcgagtacttggaagactgatggcacaacccgtgttttttgctagatggaacagcaagcaccggatcccgcaatgcgggcggcgctgcagagccagccgtccggcattaactcctcggacgattggacccaggccatgcaacgtatcatggcgttgacgactcgcaaccccgaagcctttagacagcaaccccaggccaaccgtctatcggccatcatggaagctgtagtgccttcccgctctaatcccactcatgagaaggtcctggccatcgtgaacgcgttggtggagaacaaagctattcgtccagatgaggccggactggtatacaacgctctcttagaacgcgtggctcgctacaacagtagcaatgtgcaaaccaatttggaccgtatgataacagatgtacgcgaagccgtgtctcagcgcgaaaggttccagcgtgatgccaacctgggttcgctggtggcgttaaatgctttcttgagtactcagcctgctaatgtgccgcgtggtcaacaggattatactaactttttaagtgctttgagactgatggtatcagaagtacctcagagcgaagtgtatcagtccggtcctgattacttctttcagactagcagacagggcttgcagacggtaaatctgagccaagcttttaaaaaccttaaaggtttgtggggagtgcatgccccggtaggagaaagagcaaccgtgtctagcttgttaactccgaactcccgcctattattactgttggtagctcctttcaccgacagcggtagcatcgaccgtaattcctatttgggttacctactaaacctgtatcgcgaagccatagggcaaagtcaggtggacgagcagacctatcaagaaattacccaagtcagtcgcgctttgggacaggaagacactggcagtttggaagccactctgaacttcttgcttaccaatcggtctcaaaagatccctcctcaatatgctcttactgcggaggaggagaggatccttagatatgtgcagcagagcgtgggattgtttctgatgcaagagggggcaactccgactgcagcactggacatgacagcgcgaaatatggagcccagcatgtatgccagtaaccgacctttcattaacaaactgctggactacttgcacagagctgccgctatgaactctgattatttcaccaatgccatcttaaacccgcactggctgcccccacctggtttctacacgggcgaatatgacatgcccgaccctaatgacggatttctgtgggacgacgtggacagcgatgttttttcacctctttctgatcatcgcacgtggaaaaaggaaggcggcgatagaatgcattcttctgcatcgctgtccggggtcatgggtgctaccgcggctgagcccgagtctgcaagtccttttcctagtctacccttttctctacacagtgtacgtagcagcgaagtgggtagaataagtcgcccgagtttaatgggcgaagaggagtatctaaacgattccttgctcagaccggcaagagaaaaaaatttcccaaacaatggaatagaaagtttggtggataaaatgagtagatggaagacttatgctcaggatcacagagacgagcctgggatcatggggattacaagtagagcgagccgtagacgccagcgccatgacagacagaggggtcttgtgtgggacgatgaggattcggccgatgatagcagcgtgctggacttgggtgggagaggaaggggcaacccgtttgctcatttgcgccctcgcttgggtggtatgttgtaaaaaaaaataaaaaaaaaactcaccaaggccatggcgacgagcgtacgttcgttcttctttattatctgtgtctagtataatgaggcgagtcgtgctaggcggagcggtggtgtatccggagggtcctcctccttcgtacgagagcgtgatgcagcagcagcaggcgacggcggtgatgcaatccccactggaggctccctttgtgcctccgcgatacctggcacctacggagggcagaaacagcattcgttattcggaactggcacctcagtacgataccaccaggttgtatctggtggacaacaagtcggcggacattgcttctctgaactatcagaatgaccacagcaacttcttgaccacggtggtgcaaaacaatgactttacccctacggaagccagcacccagaccattaactttgatgaacgatcgcggtggggcggtcagctaaagaccatcatgcatactaacatgccaaacgtgaacgagtatatgtttagtaacaagttcaaagcgcgtgtgatggtgtccagaaaacctcccgacggtgctgcagttggggatacttatgatcacaagcaggatattttgaaatatgagtggttcgagtttactttgccagaaggcaacttttcagttactatgactattgatttgatgaacaatgccatcatagataattacttgaaagtgggtagacagaatggagtgcttgaaagtgacattggtgttaagttcgacaccaggaacttcaagctgggatgggatcccgaaaccaagttgatcatgcctggagtgtatacgtatgaagccttccatcctgacattgtcttactgcctggctgcggagtggattttaccgagagtcgtttgagcaaccttcttggtatcagaaaaaaacagccatttcaagagggttttaagattttgtatgaagatttagaaggtggtaatattccggccctcttggatgtagatgcctatgagaacagtaagaaagaacaaaaagccaaaatagaagctgctacagctgctgcagaagctaaggcaaacatagttgccagcgactctacaagggttgctaacgctggagaggtcagaggagacaattttgcgccaacacctgttccgactgcagaatcattattggccgatgtgtctgaaggaacggacgtgaaactcactattcaacctgtagaaaaagatagtaagaatagaagctataatgtgttggaagacaaaatcaacacagcctatcgcagttggtatctttcgtacaattatggcgatcccgaaaaaggagtgcgttcctggacattgctcaccacctcagatgtcacctgcggagcagagcaggtctactggtcgcttccagacatgatgaaggatcctgtcactttccgctccactagacaagtcagtaactaccctgtggtgggtgcagagcttatgcccgtcttctcaaagagcttctacaacgaacaagctgtgtactcccagcagctccgccagtccacctcgcttacgcacgtcttcaaccgctttcctgagaaccagattttaatccgtccgccggcgcccaccattaccaccgtcagtgaaaacgttcctgctctcacagatcacgggaccctgccgttgcgcagcagtatccggggagtccaacgtgtgaccgttactgacgccagacgccgcacctgtccctacgtgtacaaggcactgggcatagtcgcaccgcgcgtcctttcaagccgcactttctaaaaaaaaaaaaaatgtccattcttatctcgcccagtaataacaccggttggggtctgcgcgctccaagcaagatgtacggaggcgcacgcaaacgttctacccaacatcctgtccgtgttcgcggacattttcgcgctccatggggcgccctcaagggccgcactcgcgttcgaaccaccgtcgatgatgtaatcgatcaggtggttgccgacgcccgtaattatactcctactgcgcctacatctactgtggatgcagttattgacagtgtagtggctgacgctcgcaactatgctcgacgtaagagccggcgaaggcgcattgccagacgccaccgagctaccactgccatgcgagccgcaagagctctgctacgaagagctagacgcgtggggcgaagagccatgcttagggcggccagacgtgcagcttcgggcgccagcgccggcaggtcccgcaggcaagcagccgctgtcgcagcggcgactattgccgacatggcccaatcgcgaagaggcaatgtatactgggtgcgtgacgctgccaccggtcaacgtgtacccgtgcgcacccgtccccctcgcacttagaagatactgagcagtctccgatgttgtgtcccagcggcgaggatgtccaagcgcaaatacaaggaagaaatgctgcaggttatcgcacctgaagtctacggccaaccgttgaaggatgaaaaaaaaccccgcaaaatcaagcgggttaaaaaggacaaaaaagaagaggaagatggcgatgatgggctggcggagtttgtgcgcgagtttgccccacggcgacgcgtgcaatggcgtgggcgcaaagttcgacatgtgttgagacctggaacttcggtggtctttacacccggcgagcgttcaagcgctacttttaagcgttcctatgatgaggtgtacggggatgatgatattcttgagcaggcggctgaccgattaggcgagtttgcttatggcaagcgtagtagaataacttccaaggatgagacagtgtcgatacccttggatcatggaaatcccacccctagtcttaaaccggtcactttgcagcaagtgttacccgtaactccgcgaacaggtgttaaacgcgaaggtgaagatttgtatcccactatgcaactgatggtacccaaacgccagaagttggaggacgttttggagaaagtaaaagtggatccagatattcaacctgaggttaaagtgagacccattaagcaggtagcgcctggtctgggggtacaaactgtagacattaagattcccactgaaagtatggaagtgcaaactgaacccgcaaagcctactgccacctccactgaagtgcaaacggatccatggatgcccatgcctattacaactgacgccgccggtcccactcgaagatcccgacgaaagtacggtccagcaagtctgttgatgcccaattatgttgtacacccatctattattcctactcctggttaccgaggcactcgctactatcgcagccgaaacagtacctcccgccgtcgccgcaagacacctgcaaatcgcagtcgtcgccgtagacgcacaagcaaaccgactcccggcgccctggtgcggcaagtgtaccgcaatggtagtgcggaacctttgacactgccgcgtgcgcgttaccatccgagtatcatcacttaatcaatgttgccgctgcctccttgcagatatggccctcacttgtcgccttcgcgttcccatcactggttaccgaggaagaaactcgcgccgtagaagagggatgttgggacgcggaatgcgacgctacaggcgacggcgtgctatccgcaagcaattgcggggtggttttttaccagccttaattccaattatcgctgctgcaattggcgcgataccaggcatagcttccgtggcggttcaggcctcgcaacgacattgacattggaaaaaaacgtataaataaaaaaaaaaaaatacaatggactctgacactcctggtcctgtgactatgttttcttagagatggaagacatcaatttttcatccttggctccgcgacacggcacgaagccgtacatgggcacctggagcgacatcggcacgagccaactgaacgggggcgccttcaattggagcagtatctggagcgggcttaaaaattttggctcaaccataaaaacatacgggaacaaagcttggaacagcagtacaggacaggcgcttagaaataaacttaaagaccagaacttccaacaaaaagtagtcgatgggatagcttccggcatcaatggagtggtagatttggctaaccaggctgtgcagaaaaagataaacagtcgtttggacccgccgccagcaaccccaggtgaaatgcaagtggaggaagaaattcctccgccagaaaaacgaggcgacaagcgtccgcgtcccgatttggaagagacgctggtgacgcgcgtagatgaaccgccttcttatgaggaagcaacgaagcttggaatgcccaccactagaccgatagccccaatggccaccggggtgatgaaaccttctcagttgcatcgacccgtcaccttggatttgccccctccccctgctgctactgctgtacccgcttctaagcctgtcgctgccccgaaaccagtcgccgtagccaggtcacgtcccgggggcgctcctcgtccaaatgcgcactggcaaaatactctgaacagcatcgtgggtctaggcgtgcaaagtgtaaaacgccgtcgctgcttttaattaaatatggagtagcgcttaacttgcctatctgtgtatatgtgtcattacacgccgtcacagcagcagaggaaaaaaggaagaggtcgtgcgtcgacgctgagttactttcaagatggccaccccatcgatgctgccccaatgggcatacatgcacatcgccggacaggatgcttcggagtacctgagtccgggtctggtgcagttcgcccgcgccacagacacctacttcaatctgggaaataagtttagaaatcccaccgtagcgccgacccacgatgtgaccaccgaccgtagccagcggctcatgttgcgcttcgtgcccgttgaccgggaggacaatacatactcttacaaagtgcggtacaccctggccgtgggcgacaacagagtgctggatatggccagcacgttctttgacattaggggtgtgttggacagaggtcccagtttcaaaccctattctggtacggcttacaactccctggctcctaaaggcgctccaaatacatctcagtggattgcagaaggtgtaaaaaatacaactggtgaggaacacgtaacagaagaggaaaccaatactactacttacacttttggcaatgctcctgtaaaagctgaagctgaaattacaaaagaaggactcccagtaggtttggaagtttcagatgaagaaagtaaaccgatttatgctgataaaacatatcagccagaacctcagctgggagatgaaacttggactgaccttgatggaaaaaccgaaaagtatggaggcagggctctcaaacccgatactaagatgaaaccatgctacgggtcctttgccaaacctactaatgtgaaaggcggtcaggcaaaacaaaaaacaacggagcagccaaatcagaaagtcgaatatgatatcgacatggagttttttgatgcggcatcgcagaaaacaaacttaagtcctaaaattgtcatgtatgcagaaaatgtaaatttggaaactccagacactcatgtagtgtacaaacctggaacagaagacacaagttccgaagctaatttgggacaacaatctatgcccaacagacccaactacattggcttcagagataactttattggacttatgtactataacagtactggtaacatgggggtgctggctggtcaagcgtctcagttaaatgcagtggttgacttgcaggacagaaacacagaactttcttaccaactcttgcttgactctctgggcgacagaaccagatactttagcatgtggaatcaggctgtggacagttatgatcctgatgtacgtgttattgaaaatcatggtgtggaagatgaacttcccaactactgttttccactggacggcataggtgttccaacaaccagttacaaatcaatagttccaaatggagacaatgcgcctaattggaaggaacctgaagtaaatggaacaagtgagatcggacagggtaatttgtttgccatggaaattaaccttcaagccaatctatggcgaagtttcctttattccaatgtggctctatatctcccagactcgtacaaatacaccccgtccaatgtcactcttccagaaaacaaaaacacctacgactacatgaacgggcgggtggtgccgccatctctagtagacacctatgtgaacattggtgccaggtggtctctggatgccatggacaatgtcaacccattcaaccaccaccgtaacgctggcttgcgttaccgatccatgcttctgggtaacggacgttatgtgcctttccacatacaagtgcctcaaaaattcttcgctgttaaaaacctgctgcttctcccaggctcctacacttatgagtggaactttaggaaggatgtgaacatggttctacagagttccctcggtaacgacctgcgggtagatggcgccagcatcagtttcacgagcatcaacctctatgctacttttttccccatggctcacaacaccgcttccacccttgaagccatgctgcggaatgacaccaatgatcagtcattcaacgactacctatctgcagctaacatgctctaccccattcctgccaatgcaaccaatattcccatttccattccttctcgcaactgggcggctttcagaggctggtcatttaccagactgaaaaccaaagaaactccctctttggggtctggatttgacccctactttgtctattctggttctattccctacctggatggtaccttctacctgaaccacacttttaagaaggtttccatcatgtttgactcttcagtgagctggcctggaaatgacaggttactatctcctaacgaatttgaaataaagcgcactgtggatggcgaaggctacaacgtagcccaatgcaacatgaccaaagactggttcttggtacagatgctcgccaactacaacatcggctatcagggcttctacattccagaaggatacaaagatcgcatgtattcatttttcagaaacttccagcccatgagcaggcaggtggttgatgaggtcaattacaaagacttcaaggccgtcgccataccctaccaacacaacaactctggctttgtgggttacatggctccgaccatgcgccaaggtcaaccctatcccgctaactatccctatccactcattggaacaactgccgtaaatagtgttacgcagaaaaagttcttgtgtgacagaaccatgtggcgcataccgttctcgagcaacttcatgtctatgggggcccttacagacttgggacagaatatgctctatgccaactcagctcatgctctggacatgacctttgaggtggatcccatggatgagcccaccctgctttatcttctcttcgaagttttcgacgtggtcagagtgcatcagccacaccgcggcatcatcgaggcagtctacctgcgtacaccgttctcggccggtaacgctaccacgtaagaagcttcttgcttcttgcaaatagcagctgcaaccatggcctgcggatcccaaaacggctccagcgagcaagagctcagagccattgtccaagacctgggttgcggaccctattttttgggaacctacgataagcgcttcccggggttcatggcccccgataagctcgcctgtgccattgtaaatacggccggacgtgagacggggggagagcactggttggctttcggttggaacccacgttctaacacctgctacctttttgatccttttggattctcggatgatcgtctcaaacagatttaccagtttgaatatgagggtctcctgcgccgcagcgctcttgctaccaaggaccgctgtattacgctggaaaaatctacccagaccgtgcagggtccccgttctgccgcctgcggacttttctgctgcatgttccttcacgcctttgtgcactggcctgaccgtcccatggacggaaaccccaccatgaaattgctaactggagtgccaaacaacatgcttcattctcctaaagtccagcccaccctgtgtgacaatcaaaaagcactctaccattttcttaatacccattcgccttattttcgctcccatcgtacacacatcgaaagggccactgcgttcgaccgtatggatgttcaataatgactcatgtaaacaacgtgttcaataaacatcactttatttttttacatgtatcaaggctctgcattacttatttatttacaagtcgaatgggttctgacgagaatcagaatgacccgcaggcagtgatacgttgcggaactgatacttgggttgccacttgaattcgggaatcaccaacttgggaaccggtatatcgggcaggatgtcactccacagctttctggtcagctgcaaagctccaagcaggtcaggagccgaaatcttgaaatcacaattaggaccagtgctttgagcgcgagagttgcggtacaccggattgcagcactgaaacaccatcagcgacggatgtctcacgcttgccagcacggtgggatctgcaatcatgcccacatccagatcttcagcattggcaatgctgaacggggtcatcttgcaggtctgcctacccatggcgggcacccaattaggcttgtggttgcaatcgcagtgcagggggatcagtatcatcttggcctgatcctgtctgattcctggatacacggctctcatgaaagcatcatattgcttgaaagcctgctgggctttactaccctcggtataaaacatcccgcaggacctgctcgaaaactggttagctgcacagccggcatcattcacacagcagcgggcgtcattgttagctatttgcaccacacttctgccccagcggttttgggtgattttggttcgctcgggattctcctttaaggctcgttgtccgttctcgctggccacatccatctcgataatctgctccttctgaatcataatattgccatgcaggcacttcagcttgccctcataatcattgcagccatgaggccacaacgcacagcctgtacattcccaattatggtgggcgatctgagaaaaagaatgtatcattccctgcagaaatcttcccatcatcgtgctcagtgtcttgtgactagtgaaagttaactggatgcctcggtgctcctcgtttacgtactggtgacagatgcgcttgtattgttcgtgttgctcaggcattagtttaaaagaggttctaagttcgttatccagcctgtacttctccatcagcagacacatcacttccatgcctttctcccaagcagacaccaggggcaagctaatcggattcttaacagtgcaggcagcagctcctttagccagagggtcatctttagcgatcttctcaatgcttcttttgccatccttctcaacgatgcgcacgggcgggtagctgaaacccactgctacaagttgcgcctcttctctttcttcttcgctgtcttgactgatgtcttgcatggggatatgtttggtcttccttggcttctttttggggggtatcggaggaggaggactgtcgctccgttccggagacagggaggattgtgacgtttcgctcaccattaccaactgactgtcggtagaagaacctgaccccacacggcgacaggtgtttctcttcgggggcagaggtggaggcgattgcgaagggctgcggtccgacctggaaggcggatgactggcagaaccccttccgcgttcgggggtgtgctccctgtggcggtcgcttaactgatttccttcgcggctggccattgtgttctcctaggcagagaaacaacagacatggaaactcagccattgctgtcaacatcgccacgagtgccatcacatctcgtcctcagcgacgaggaaaaggagcagagcttaagcattccaccgcccagtcctgccaccacctctaccctagaagataaggaggtcgacgcatctcatgacatgcagaataaaaaagcgaaagagtctgagacagacatcgagcaagacccgggctatgtgacaccggtggaacacgaggaagagttgaaacgctttctagagagagaggatgaaaactgcccaaaacaacgagcagataactatcaccaagatgctggaaatagggatcagaacaccgactacctcatagggcttgacggggaagacgcgctccttaaacatctagcaagacagtcgctcatagtcaaggatgcattattggacagaactgaagtgcccatcagtgtggaagagctcagccgcgcctacgagcttaacctcttttcacctcgtactccccccaaacgtcagccaaacggcacctgcgagccaaatcctcgcttaaacttttatccagcttttgctgtgccagaagtactggctacctatcacatcttttttaaaaatcaaaaaattccagtctcctgccgcgctaatcgcacccgcgccgatgccctactcaatctgggacctggttcacgcttacctgatatagcttccttggaagaggttccaaagatcttcgagggtctgggcaataatgagactcgggccgcaaatgctctgcaaaagggagaaaatggcatggatgagcatcacagcgttctggtggaattggaaggcgataatgccagactcgcagtactcaagcgaagcatcgaggtcacacacttcgcatatcccgctgtcaacctgccccctaaagtcatgacggcggtcatggaccagttactcattaagcgcgcaagtcccctttcagaagacatgcatgacccagatgcctgtgatgagggtaaaccagtggtcagtgatgagcagctaacccgatggctgggcaccgactctcccagggatttggaagagcgtcgcaagcttatgatggccgtggtgctggttaccgtagaactagagtgtctccgacgtttctttaccgattcagaaaccttgcgcaaactcgaagagaatctgcactacacttttagacacggctttgtgcggcaggcatgcaagatatctaacgtggaactcaccaacctggtttcctacatgggtattctgcatgagaatcgcctaggacaaagcgtgctgcacagcaccctgaagggggaagcccgccgtgattacatccgcgattgtgtctatctgtacctgtgccacacgtggcaaaccggcatgggtgtatggcagcaatgtttagaagaacagaacttgaaagagcttgacaagctcttacagaaatctcttaaggttctgtggacagggttcgacgagcgcaccgtcgcttccgacctggcagacctcatcttcccagagcgtctcagggttactttgcgaaacggattgcctgactttatgagccagagcatgcttaacaattttcgctctttcatcctggaacgctccggtatcctgcccgccacctgctgcgcactgccctccgactttgtgcctctcacctaccgcgagtgccccccgccgctatggagtcactgctacctgttccgtctggccaactatctctcctaccactcggatgtgatcgaggatgtgagcggagacggcttgctggagtgtcactgccgctgcaatctgtgcacgccccaccggtccctagcttgcaacccccagttgatgagcgaaacccagataataggcacctttgaattgcaaggccccagcagccaaggcgatgggtcttctcctgggcaaagtttaaaactgaccccgggactgtggacctccgcctacttgcgcaagtttgctccggaagattaccacccctatgaaatcaagttctatgaggaccaatcacagcctccaaaggccgaactttcggcctgcgtcatcacccagggggcaattctggcccaattgcaagccatccaaaaatcccgccaagaatttctactgaaaaagggtaagggggtctaccttgacccccagaccggcgaggaactcaacacaaggttccctcaggatgtcccaacgacgagaaaacaagaagttgaaggtgcagccgccgcccccagaagatatggaggaagattgggacagtcaggcagaggaggcggaggaggacagtctggaggacagtctggaggaagacagtttggaggaggaaaacgaggaggcagaggaggtggaagaagtaaccgccgacaaacagttatcctcggctgcggagacaagcaacagcgctaccatctccgctccgagtcgaggaacccggcggcgtcccagcagtagatgggacgagaccggacgcttcccgaacccaaccagcgcttccaagaccggtaagaaggatcggcagggatacaagtcctggcgggggcataagaatgccatcatctcctgcttgcatgagtgcgggggcaacatatccttcacgcggcgctacttgctattccaccatggggtgaactttccgcgcaatgttttgcattactaccgtcacctccacagcccctactatagccagcaaatcccggcagtctcgacagataaagacagcggcggcgacctccaacagaaaaccagcagcggcagttagaaaatacacaacaagtgcagcaacaggaggattaaagattacagccaacgagccagcgcaaacccgagagttaagaaatcggatctttccaaccctgtatgccatcttccagcagagtcggggtcaagagcaggaactgaaaataaaaaaccgatctctgcgttcgctcaccagaagttgtttgtatcacaagagcgaagatcaacttcagcgcactctcgaggacgccgaggctctcttcaacaagtactgcgcgctgactcttaaagagtaggcagcgaccgcgcttattcaaaaaaggcgggaattacatcatcctcgacatgagtaaagaaattcccacgccttacatgtggagttatcaaccccaaatgggattggcggcaggcgcctcccaggactactccacccgcatgaattggctcagcgccgggccttctatgatttctcgagttaatgatatacgcgcctaccgaaaccaaatacttttggaacagtcagctcttaccaccacgccccgccaacaccttaatcccagaaattggcccgccgccctagtgtaccaggaaagtcccgctcccaccactgtattacttcctcgagacgcccaggccgaagtccaaatgactaatgcaggtgcgcagttagctggcggctccaccctatgtcgtcacaggcctcggcataatataaaacgcctgatgatcagaggccgaggtatccagctcaacgacgagtcggtgagctctccgcttggtctacgaccagacggaatctttcagattgccggctgcgggagatcttccttcacccctcgtcaggctgttctgactttggaaagttcgtcttcgcaaccccgctcgggcggaatcgggaccgttcaatttgtggaggagtttactccctctgtctacttcaaccccttctccggatctcctgggcattacccggacgagttcataccgaacttcgacgcgattagcgagtcagtggacggctacgattgatgtctggtgacgcggctgagctatctcggctgcgacatctagaccactgccgccgctttcgctgctttgcccgggaactcattgagttcatctacttcgaactccccaaggatcaccctcaaggtccggcccacggagtgcggatttctatcgaaggcaaaatagactctcgcctgcaacgaattttctcccagcggcccgtgctgatcgagcgagaccagggaaacaccacggtttccatctactgcatttgtaatcaccccggattgcatgaaagcctttgctgtcttatgtgtactgagtttaataaaaactgaattaagactctcctacggactgccgcttcttcaacccggattttacaaccagaagaacgaaacttttcctgtcgtccaggactctgttaacttcacctttcctactcacaaactagaagctcaacgactacaccgcttttccagaagcattttccctactaatactactttcaaaaccggaggtgagctccaaggtcttcctacagaaaacccttgggtggaagcgggccttgtagtgctaggaattcttgcgggtgggcttgtgattattctttgctacctatacacaccttgcttcactttcttagtggtgttgtggtattggtttaaaaaatggggcccatactagtcttgcttgttttactttcgcttttggaaccgggttctgccaattacgatccatgtctagacttcgacccagaaaactgcacacttacttttgcacccgacacaagccgcatctgtggagttcatcgcctctcttacgaacttggcccccaacgacaaaaatttacctgcatggtgggaatcaaccccatagttatcacccagcaaagtggagatactaagggttgcattcactgctcctgcgattccatcgagtgcacctacaccctgctgaagaccctatgcggcctaagagacctgctaccaatgaattaaaaaatgattaataaaaaatcacttacttgaaatcagcaataaggtctctgttgaaattttctcccagcagcacctcacttccctcttcccaactctggtattctaaaccccgttcagcggcatactttctccatactttaaaggggatgtcaaattttagctcctctcctgtacccacaatcttcatgtctttcttcccagatgaccaagagagtccggctcagtgactccttcaaccctgtctacccctatgaagatgaaagcacctcccaacacccctttataaacccagggtttatttccccaaatggcttcacacaaagcccaaacggagttcttactttaaaatgtttaaccccactaacaaccacaggcggatctctacagctaaaagtgggagggggacttacagtggatgacaccaacggttttttgaaagaaaacataagtgccaccacaccactcgttaagactggtcactctataggtttaccactaggagccggattgggaacgaatgaaaataaactttgtatcaaattaggacaaggacttacattcaattcaaacaacatttgcattgatgacaatattaacaccttatggacaggagtcaaccccaccgaagccaactgtcaaatcatgaactccagtgaatctaatgattgcaaattaattctaacactagttaaaactggagcactagtcactgcatttgtttatgttataggagtatctaacaattttaatatgctaactacacacagaaatataaattttactgcagagctgtttttcgattctactggtaatttactaactagactctcatccctcaaaactccacttaatcataaatcaggacaaaacatggctactggtgccattactaatgctaaaggtttcatgcccagcacgactgcctatcctttcaatgataattctagagaaaaagaaaactacatttacggaacttgttactacacagctagtgatcgcactgcttttcccattgacatatctgtcatgcttaaccgaagagcaataaatgacgagacatcatattgtattcgtataacttggtcctggaacacaggagatgccccagaggtgcaaacctctgctacaaccctagtcacctccccatttaccttttactacatcagagaagacgactgacaaataaagtttgcgatcgccaggcccaccatggcccagtctctggctctgtctctgctgattctcgtgctggcttttggcatccctagaacccaaggcagcgacggcggagctcaagactgttgtctgaagtactcccagaggaagattcccgccaaggtggtgaggagctacagaaagcaagagcccagcctcggatgctccatccccgccattctgtttctgcctaggaagagatcccaagccgagctgtgtgctgaccccaaagagctgtgggtgcagcagctgatgcaacatctcgataagaccccctcccctcagaaacccgcccaaggctgtagaaaggataggggagcctccaagaccggcaagaagggcaagggcagcaagggctgcaagaggaccgagagatcccagacccctaagggacccggcagcggccagtgcacaaattacgctctgctgaagctcgctggcgacgtggagtccaaccccggccccgcccctaggagggctaggggatgcagaacactgggactgcccgctctgctgctgctgctgctgctgagaccccccgccaccagaggcattacatgtcctccccccatgagcgtggagcacgccgacatctgggtcaagtcctattctctgtactctagagagagatatatctgcaactccggattcaaaaggaaggctggcaccagctctctgacagagtgcgtgctgaacaaagccacaaacgtggctcactggaccaccccctccctcaagtgtattagagacggatccggcgccaccaatttctctctgctgaaacaagccggagacgtggaagagaatcccggacccgactggacatggaggatcctctttctggtggctgctgctaccggcgcccatagcaactgggtgaacgtgatcagcgatctgaaaaagattgaggatctgattcagagcatgcatatcgacgccacactgtataccgagagcgatgtgcaccctagctgcaaagtcaccgccatgaagtgctttctgctcgagctgcaagtgatttctctggagagcggcgatgcctccatccacgacaccgtggagaacctcatcattctggctaacaactccctctcctccaatggcaacgtcacagagtccggctgtaaggagtgcgaagaactcgaagagaaaaatatcaaagaattcctccagagcttcgtgcacatcgtccagatgtttattaacacaagcggctccggagaaggcagaggctccctcctcacatgtggcgacgtcgaggagaatcccggccccatgtgccatcagcagctcgtgatcagctggttctctctggtctttctcgccagccctctcgtcgctatttgggagctcaagaaggacgtgtacgtcgtggaactcgattggtatcccgatgctcccggcgaaatggtggtgctgacatgcgacacacccgaggaagacggcattacatggacactggatcagtccagcgaggtcctcggcagcggcaagaccctcaccattcaagtgaaggaattcggcgacgccggccagtatacatgccacaagggcggagaagtgctctcccactctctgctgctgctgcacaagaaagaggacggcatctggtccaccgacattctcaaggaccagaaagagcctaaaaacaaaacatttctgaggtgcgaggctaagaactactccggaaggttcacatgctggtggctcaccaccatcagcacagatctgaccttcagcgtcaaatcctctagaggctcctccgatcctcaaggcgtgacatgcggcgctgctacactgtccgctgagagggtgaggggcgacaacaaggagtatgagtacagcgtggaatgccaagaggatagcgcttgccccgccgctgaagaatctctgcctatcgaagtcatggtggatgccgtgcataagctgaagtacgagaattacacaagcagcttcttcatcagagacatcattaagcccgatccccccaagaatctgcaactgaagcctctgaagaattctagacaagtggaagtcagctgggagtaccccgacacatggagcaccccccattcctacttctccctcaccttttgtgtccaagtgcaaggcaagtccaagagggagaagaaggatagggtgttcacagataaaaccagcgccaccgtcatctgtagaaagaatgcctccatttccgtgagggctcaagatagatactacagctccagctggagcgagtgggcttccgtcccttgctccggaggaggaggaagcggaggaggcggaagcggcggcggaggcagcagaaatctgcccgtggctacacccgatcccggcatgtttccttgcctccaccatagccagaatctgctgagggctgtctccaacatgctccagaaggctagacagaccctcgaattctacccttgcaccagcgaggagattgaccacgaggacatcaccaaggacaagacatccacagtcgaggcttgtctgcctctggaactcaccaagaatgagagctgtctgaactctagagagacatccttcatcaccaacggaagctgtctcgcttctagaaaaacaagcttcatgatggctctgtgtctgagctccatctacgaggatctgaagatgtaccaagtggagttcaagaccatgaacgctaagctgctgatggaccccaagaggcagatcttcctcgatcagaacatgctcgccgtgattgacgagctgatgcaagctctgaactttaactccgagacagtcccccagaagagctccctcgaagagcccgacttttacaagacaaaaattaagctgtgtattctgctgcatgcctttagaattagagccgtgaccatcgatagggtgatgagctacctcaatgctagctaagctagcttgactgactgagatacagcgtaccttcagctcacagacatgataagatacattgatgagtttggacaaaccacaactagaatgcagtgaaaaaaatgctttatttgtgaaatttgtgatgctattgctttatttgtaaccattataagctgcaataaacaagttaacaacaacaattgcattcattttatgtttcaggttcagggggaggtgtgggaggttttttaaagcaagtaaaacctctacaaatgtggtagtcgtcagctatcctgcaggaacttgtttatttgaaaatcaattcacaaaatccgagtagttattttgcctcccccttcccatttaacagaatacaccaatctctccccacgcacagctttaaacatttggataccattagatatagacatggttttagattccacattccaaacagtttcagagcgagccaatctggggtcagtgatagataaaaatccatcgggatagtcttttaaagcgctttcacagtccaactgctgcggatgcgactccggagtctggatcacggtcatctggaagaagaacgatgggaatcataatccgaaaacggtatcggacgattgtgtctcatcaaacccacaagcagccgctgtctgcgtcgctccgtgcgactgctgtttatgggatcagggtccacagtgtcctgaagcatgattttaatagcccttaacatcaactttctggtgcgatgcgcgcagcaacgcattctgatttcactcaaatctttgcagtaggtacaacacattattacaatattgtttaataaaccataattaaaagcgctccagccaaaactcatatctgatataatcgcccctgcatgaccatcataccaaagtttaatataaattaaatgacgttccctcaaaaacacactacccacatacatgatctcttttggcatgtgcatattaacaatctgtctgtaccatggacaacgttggttaatcatgcaacccaatataaccttccggaaccacactgccaacaccgctcccccagccatgcattgaagtgaaccctgctgattacaatgacaatgaagaacccaattctctcgaccgtgaatcacttgagaatgaaaaatatctatagtggcacaacatagacataaatgcatgcatcttctcataatttttaactcctcaggatttagaaacatatcccagggaataggaagctcttgcagaacagtaaagctggcagaacaaggaagaccacgaacacaacttacactatgcatagtcatagtatcacaatctggcaacagcgggtggtcttcagtcatagaagctcgggtttcattttcctcacaacgtggtaactgggctctggtgtaagggtgatgtctggcgcatgatgtcgagcgtgcgcgcaaccttgtcataatggagttgcttcctgacattctcgtattttgtatagcaaaacgcggccctggcagaacacactcttcttcgccttctatcctgccgcttagcgtgttccgtgtgatagttcaagtacaaccacactcttaagttggtcaaaagaatgctggcttcagttgtaatcaaaactccatcgcatctaatcgttctgaggaaatcatccaagcaatgcaactggattgtgtttcaagcaggagaggagagggaagagacggaagaaccatgttaatttttattccaaacgatctcgcagtacttcaaattgtagatcgcgcagatggcatctctcgcccccactgtgttggtgaaaaagcacagctagatcaaaagaaatgcgattttcaaggtgctcaacggtggcttccagcaaagcctccacgcgcacatccaagaacaaaagaataccaaaagaaggagcattttctaactcctcaatcatcatattacattcctgcaccattcccagataattttcagctttccagccttgaattattcgtgtcagttcttgtggtaaatccaatccacacattacaaacaggtcccggagggcgccctccaccaccattcttaaacacaccctcataatgacaaaatatcttgctcctgtgtcacctgtagcgaattgagaatggcaacatcaattgacatgcccttggctctaagttcttctttaagttctagttgtaaaaactctctcatattatcaccaaactgcttagccagaagccccccgggaacaagagcaggggacgctacagtgcagtacaagcgcagacctccccaattggctccagcaaaaacaagattggaataagcatattgggaaccgccagtaatatcatcgaagttgctggaaatataatcaggcagagtttcttgtaaaaattgaataaaagaaaaatttgccaaaaaaacattcaaaacctctgggatgcaaatgcaataggttaccgcgctgcgctccaacattgttagttttgaattagtctgcaaaaataaaaaaaaaaacaagcgtcatatcatagtagcctgacgaacagatggataaatcagtctttccatcacaagacaagccacagggtctccagctcgaccctcgtaaaacctgtcatcatgattaaacaacagcaccgaaagttcctcgcggtgaccagcatgaataattcttgatgaagcatacaatccagacatgttagcatcagttaacgagaaaaaacagccaacatagcctttgggtataattatgcttaatcgtaagtatagcaaagccacccctcgcggatacaaagtaaaaggcacaggagaataaaaaatataattatttctctgctgctgttcaggcaacgtcgcccccggtccctctaaatacacatacaaagcctcatcagccatggcttaccagacaaagtacagcgggcacacaaagcacaagctctaaagtgactctccaacctctccacaatatatatatacacaagccctaaactgacgtaatgggagtaaagtgtaaaaaatcccgccaaacccaacacacaccccgaaactgcgtcaccagggaaaagtacagtttcacttccgcaatcccaacaggcgtaacttcctctttctcacggtacgtgatatcccactaacttgcaacgtcattttcccacggtcgcaccgccccttttagccgttaaccccacagccaatcaccacacgatccacactttttaaaatcacctcatttacatattggcaccattccatctataaggtatattatatagataga

SEQ ID NO: 233 - protein, 568 aa, Artificial Sequence
  Protein sequence encoded by NG-701 transgene cassette
MCPARSLLLVATLVLLDHLSLARNLPVATPDPGMFPCLHHSQNLLRAVSNMLQKARQTLEFYPCTSEEIDHEDITKDKTSTVEACLPLELTKNESCLNSRETSFITNGSCLASRKTSFMMALCLSSIYEDLKMYQVEFKTMNAKLLMDPKRQIFLDQNMLAVIDELMQALNFNSETVPQKSSLEEPDFYKTKIKLCILLHAFRIRAVTIDRVMSYLNASGSGATNFSLLKQAGDVEENPGPCHQQLVISWFSLVFLASPLVAIWELKKDVYVVELDWYPDAPGEMVVLTCDTPEEDGITWTLDQSSEVLGSGKTLTIQVKEFGDAGQYTCHKGGEVLSHSLLLLHKKEDGIWSTDILKDQKEPKNKTFLRCEAKNYSGRFTCWWLTTISTDLTFSVKSSRGSSDPQGVTCGAATLSAERVRGDNKEYEYSVECQEDSACPAAEESLPIEVMVDAVHKLKYENYTSSFFIRDIIKPDPPKNLQLKPLKNSRQVEVSWEYPDTWSTPHSYFSLTFCVQVQGKSKREKKDRVFTDKTSATVICRKNASISVRAQDRYYSSSWSEWASVPCS

SEQ ID NO: 234 - protein, 540 aa, Artificial Sequence; identical to SEQ ID NO: 11
  Protein sequence encoded by NG-702 transgene cassette

SEQ ID NO: 235 - protein, 540 aa, Artificial Sequence; identical to SEQ ID NO: 12
  Protein sequence encoded by NG-703 transgene cassette

SEQ ID NO: 236 - protein, 224 aa, Artificial Sequence
  Human IL-15 protein, with N-terminal human Ig leader sequence, joined to the Human IL-15 receptor alpha Sushi domain (without its' signal sequence) via a peptide linker
DWTWRILFLVAAATGAHSNWVNVISDLKKIEDLIQSMHIDATLYTESDVHPSCKVTAMKCFLLELQVISLESGDASIHDTVENLIILANNSLSSNGNVTESGCKECEELEEKNIKEFLQSFVHIVQMFINTSSGGGSGGGGSGGGGSGGGGSGGGSLQITCPPPMSVEHADIWVKSYSLYSRERYICNSGFKRKAGTSSLTECVLNKATNVAHWTTPSLKCIRD

SEQ ID NO: 237 - protein, 26 aa, Artificial Sequence
  Linker peptide joining IL-15 to IL-15 receptor alpha sushi domain (in NG-787 and NG-787A)
SGGGSGGGGSGGGGSGGGGSGGGSLQ

SEQ ID NO: 238 - protein, 20 aa, Artificial Sequence
  PDGFR Receptor A transmembrane region peptide
AVLVLLVIVIISLIVLVVIW

SEQ ID NO: 239 - protein, 21 aa, Artificial Sequence
  PDGFR Receptor B transmembrane region peptide
VVISAILALVVLTIISLIILI

SEQ ID NO: 240 - protein, 24 aa, Artificial Sequence
  Insulin-Like Growth Factor 1 transmembrane region peptide
IIIGPPLIFVFLFSVVIGSIYLFL

SEQ ID NO: 241 - protein, 28 aa, Artificial Sequence
  IL6-R transmembrane region peptide
SSSVPLPTFLVAGGSLAFGTLLCIAIVL

SEQ ID NO: 242 - protein, 27 aa, Artificial Sequence
  CD28 transmembrane region peptide
FWVLVVVGGVLACYSLLVTVAFIIFWV

SEQ ID NO: 243 - protein, 66 aa, Artificial Sequence
  IL-15 receptor alpha Sushi domain protein sequence
ITCPPPMSVEHADIWVKSYSLYSRERYICNSGFKRKAGTSSLTECVLNKATNVAHWTTPSLKCIRD

SEQ ID NO: 244 - protein, 96 aa, Artificial Sequence
  Protein sequence of recombinant N-terminally His-tagged IL-15Ra sushi domain protein with C-terminal P2A peptide sequence
MHHHHHHGSITCPPPMSVEHADIWVKSYSLYSRERYICNSGFKRKAGTSSLTECVLNKATNVAHWTTPSLKCIRDGSGATNFSLLKQAGDVEENPG

SEQ ID NO: 245 - DNA, 6524 bp, Artificial Sequence
  Nucleotide sequence of CMV pUC vector pUC-796A
tcgcgcgtttcggtgatgacggtgaaaacctctgacacatgcagctcccggagactgtcacagcttgtctgtaagcggatgccgggagcagacaagcccgtcagggcgcgtcagcgggtgttggcgggtgtcggggctggcttaactatgcggcatcagagcagattgtactgagagtgcaccatatgcggtgtgaaataccgcacagatgcgtaaggagaaaataccgcatcaggcgccattcgccattcaggctgcgcaactgttgggaagggcgatcggtgcgggcctcttcgctattacgccagctggcgaaagggggatgtgctgcaaggcgattaagttgggtaacgccagggttttcccagtcacgacgttgtaaaacgacggccagtgaattgacgcgtattgggatgatatcggctcccgccagatctagtaatcaattacggggtcattagttcatagcccatatatggagttccgcgttacataacttacggtaaatggcccgcctggctgaccgcccaacgacccccgcccattgacgtcaataatgacgtatgttcccatagtaacgccaatagggactttccattgacgtcaatgggtggagtatttacggtaaactgcccacttggcagtacatcaagtgtatcatatgccaagtacgccccctattgacgtcaatgacggtaaatggcccgcctggcattatgcccagtacatgaccttatgggactttcctacttggcagtacatctacgtattagtcatcgctattaccatgctgatgcggttttggcagtacatcaatgggcgtggatagcggtttgactcacggggatttccaagtctccaccccattgacgtcaatgggagtttgttttggcaccaaaatcaacgggactttccaaaatgtcgtaacaactccgccccattgacgcaaatgggcggtaggcgtgtacggtgggaggtctatataagcagagctggtttagtgaaccgtcagatcagatctttgtcgatcctaccatccactcgacacacccgccagcggccgctgccaagcttccgagctctcgaattcaaaggaggtacccaccgctagcgcgatcgccaggcccaccatgtgccaccaacagctggtgatcagctggttctccctcgtgttcctcgcttcccctctggtggccatctgggagctgaagaaggacgtctacgtggtcgagctggactggtaccccgatgcccccggcgagatggtggtgctcacatgcgacacccccgaggaggatggcatcacatggacactggatcaaagctccgaagtgctgggctccggcaagaccctcaccattcaagtgaaggagttcggagacgccggccaatacacatgccacaaaggcggagaggtgctgtcccactctctgctgctgctgcataagaaggaggacggcatttggtccaccgacattctgaaagaccagaaggagcctaaaaataaaacctttctgagatgcgaggccaagaactactccggaagattcacatgctggtggctgaccacaatctccacagacctcaccttttccgtgaaatcctctagaggaagcagcgatcctcaaggagtgacatgcggcgctgctacactcagcgccgaaagagtgagaggagataacaaggagtacgagtacagcgtggagtgccaagaggattccgcttgtcccgctgccgaagagtccctccccattgaagtgatggtggacgccgtgcataaactgaaatacgagaattacacctccagcttttttattagagacattattaaacccgacccccccaaaaacctccagctcaagcccctcaaaaatagcagacaagtggaggtgagctgggagtatcccgatacatggagcaccccccacagctatttctccctcaccttctgtgtgcaagtgcaaggcaaatccaagagggagaagaaggatagagtgttcaccgacaaaaccagcgccaccgtcatctgcagaaaaaacgctagcatcagcgtcagagcccaagatagatattactcctccagctggtccgagtgggccagcgtcccttgttccggaggcggaggatccggaggaggaggaagcggcggaggaggctccagaaacctccccgtggctacacccgaccccggaatgtttccttgcctccaccactcccaaaatctgctcagagccgtgtccaacatgctccagaaggccagacaaacactggaattctacccttgcacctccgaggaaatcgatcacgaggacatcaccaaggacaagacaagcaccgtggaagcttgtctgcctctggaactcaccaagaacgagagctgtctgaactctagagaaacaagcttcattacaaacggcagctgtctggccagcagaaagacaagcttcatgatggctctgtgtctgtccagcatctacgaggatctgaagatgtaccaagtggagtttaaaaccatgaacgctaagctgctgatggaccctaagaggcagattttcctcgaccagaacatgctggccgtgattgacgaactgatgcaagctctgaacttcaacagcgagacagtgcctcaaaagtccagcctcgaggagcccgacttctacaagaccaagatcaagctgtgcattctgctgcatgccttcagaatcagagccgtcaccatcgatagagtcatgagctatctgaacgctagcggaagcggagagggaaggggaagcctcctcacatgtggcgatgtggaagaaaaccccggacccgctcaatctctggctctgtctctgctgattctggtgctggctttcggcatccccagaacacaaggcagcgatggcggcgctcaagactgctgtctgaagtacagccagaggaagatccccgccaaggtcgtgaggagctatagaaaacaagagccttctctgggatgttccattcccgccattctgttcctccccagaaagagatcccaagccgaactgtgtgccgaccccaaggagctgtgggtgcagcagctgatgcagcatctggacaagaccccttcccctcagaagcccgctcaaggctgcagaaaagataggggagccagcaagaccggcaagaagggaaagggatccaagggctgtaagagaaccgaaaggagccagacacccaagggacccggcagcggacagtgtacaaactacgctctgctgaagctggccggagacgtggaaagcaaccccggccccgcccctaggagagctagaggctgtagaacactgggactgcccgctctgctgctgctgctgctgctgagaccccccgccacaaggggaattacatgccctccccctatgtccgtcgagcacgccgacatctgggtgaagagctactccctctactctagagagaggtatatctgtaatagcggctttaagaggaaggccggaaccagctctctgaccgaatgcgtgctgaataaggctacaaacgtggcccactggacaacccccagcctcaagtgtattagggacggctccggcgctaccaatttctctctgctgaagcaagctggcgacgtcgaagaaaatcccggacccgactggacatggaggattctgtttctggtggctgctgccaccggagctcatagcaactgggtgaacgtcattagcgatctgaagaagattgaggatctgatccagtccatgcacatcgacgccacactctataccgagagcgatgtgcaccccagctgcaaggtgaccgccatgaaatgctttctgctggaactgcaagtgatctctctggagtccggcgacgccagcatccatgataccgtggagaatctgatcattctcgccaacaactctctgagcagcaacggcaatgtgacagaatccggctgcaaggagtgtgaagagctcgaggaaaagaatatcaaggagtttctgcagtccttcgtgcacatcgtccaaatgttcatcaatacaagctgagctagcttgactgactgagatacagcgtaccttcagctcacagacatgataagatacattgatgagtttggacaaaccacaactagaatgcagtgaaaaaaatgctttatttgtgaaatttgtgatgctattgctttatttgtaaccattataagctgcaataaacaagttaacaacaacaattgcattcattttatgtttcaggttcagggggaggtgtgggaggttttttaaagcaagtaaaacctctacaaatgtggtagtcgtcagctatcctgcaggatcccaatggcgcgccgagcttggctcgagcatggtcatagctgtttcctgtgtgaaattgttatccgctcacaattccacacaacatacgagccggaagcataaagtgtaaagcctggggtgcctaatgagtgagctaactcacattaattgcgttgcgctcactgcccgctttccagtcgggaaacctgtcgtgccagctgcattaatgaatcggccaacgcgcggggagaggcggtttgcgtattgggcgctgttccgcttcctcgctcactgactcgctgcgctcggtcgttcggctgcggcgagcggtatcagctcactcaaaggcggtaatacggttatccacagaatcaggggataacgcaggaaagaacatgtgagcaaaaggccagcaaaaggccaggaaccgtaaaaaggccgcgttgctggcgtttttccataggctccgcccccctgacgagcatcacaaaaatcgacgctcaagtcagaggtggcgaaacccgacaggactataaagataccaggcgtttccccctggaagctccctcgtgcgctctcctgttccgaccctgccgcttaccggatacctgtccgcctttctcccttcgggaagcgtggcgctttctcatagctcacgctgtaggtatctcagttcggtgtaggtcgttcgctccaagctgggctgtgtgcacgaaccccccgttcagcccgaccgctgcgccttatccggtaactatcgtcttgagtccaacccggtaagacacgacttatcgccactggcagcagccactggtaacaggattagcagagcgaggtatgtaggcggtgctacagagttcttgaagtggtggcctaactacggctacactagaagaacagtatttggtatctgcgctctgctgaagccagttaccttcggaaaaagagttggtagctcttgatccggcaaacaaaccaccgctggtagcggtggtttttttgtttgcaagcagcagattacgcgcagaaaaaaaggatctcaagaagatcctttgatcttttctacggggtctgacgctcagtggaacgaaaactcacgttaagggattttggtcatgagattatcaaaaaggatcttcacctagatccttttaaattaaaaatgaagttttaaatcaatctaaagtatatatgagtaaacttggtctgacagttagaaaaactcatcgagcatcaaatgaaactgcaatttattcatatcaggattatcaataccatatttttgaaaaagccgtttctgtaatgaaggagaaaactcaccgaggcagttccataggatggcaagatcctggtatcggtctgcgattccgactcgtccaacatcaatacaacctattaatttcccctcgtcaaaaataaggttatcaagtgagaaatcaccatgagtgacgactgaatccggtgagaatggcaaaagtttatgcatttctttccagacttgttcaacaggccagccattacgctcgtcatcaaaatcactcgcatcaaccaaaccgttattcattcgtgattgcgcctgagcgaaacgaaatacgcgatcgctgttaaaaggacaattacaaacaggaatcgaatgcaaccggcgcaggaacactgccagcgcatcaacaatattttcacctgaatcaggatattcttctaatacctggaatgctgttttcccagggatcgcagtggtgagtaaccatgcatcatcaggagtacggataaaatgcttgatggtcggaagaggcataaattccgtcagccagtttagtctgaccatctcatctgtaacatcattggcaacgctacctttgccatgtttcagaaacaactctggcgcatcgggcttcccatacaatcgatagattgtcgcacctgattgcccgacattatcgcgagcccatttatacccatataaatcagcatccatgttggaatttaatcgcggcctagagcaagacgtttcccgttgaatatggctcatactcttcctttttcaatattattgaagcatttatcagggttattgtctcatgagcggatacatatttgaatgtatttagaaaaataaacaaataggggttccgcgcacatttccccgaaaagtgccacctgacgtctaagaaaccattattatcatgacattaacctataaaaataggcgtatcacgaggcccttttgtc

SEQ ID NO: 246 - DNA, 6170 bp, Artificial Sequence
  Nucleotide sequence of CMV pUC vector pRES-128
tcgcgcgtttcggtgatgacggtgaaaacctctgacacatgcagctcccggagactgtcacagcttgtctgtaagcggatgccgggagcagacaagcccgtcagggcgcgtcagcgggtgttggcgggtgtcggggctggcttaactatgcggcatcagagcagattgtactgagagtgcaccatatgcggtgtgaaataccgcacagatgcgtaaggagaaaataccgcatcaggcgccattcgccattcaggctgcgcaactgttgggaagggcgatcggtgcgggcctcttcgctattacgccagctggcgaaagggggatgtgctgcaaggcgattaagttgggtaacgccagggttttcccagtcacgacgttgtaaaacgacggccagtgaattgacgcgtattgggatgatatcggctcccgccagatctagtaatcaattacggggtcattagttcatagcccatatatggagttccgcgttacataacttacggtaaatggcccgcctggctgaccgcccaacgacccccgcccattgacgtcaataatgacgtatgttcccatagtaacgccaatagggactttccattgacgtcaatgggtggagtatttacggtaaactgcccacttggcagtacatcaagtgtatcatatgccaagtacgccccctattgacgtcaatgacggtaaatggcccgcctggcattatgcccagtacatgaccttatgggactttcctacttggcagtacatctacgtattagtcatcgctattaccatgctgatgcggttttggcagtacatcaatgggcgtggatagcggtttgactcacggggatttccaagtctccaccccattgacgtcaatgggagtttgttttggcaccaaaatcaacgggactttccaaaatgtcgtaacaactccgccccattgacgcaaatgggcggtaggcgtgtacggtgggaggtctatataagcagagctggtttagtgaaccgtcagatcagatctttgtcgatcctaccatccactcgacacacccgccagcggccgctgccaagcttccgagctctcgaattcaaaggaggtacccaccgctagcgcgatcgccaggcccaccatgtgccaccaacagctggtgatcagctggttctccctcgtgttcctcgcttcccctctggtggccatctgggagctgaagaaggacgtctacgtggtcgagctggactggtaccccgatgcccccggcgagatggtggtgctcacatgcgacacccccgaggaggatggcatcacatggacactggatcaaagctccgaagtgctgggctccggcaagaccctcaccattcaagtgaaggagttcggagacgccggccaatacacatgccacaaaggcggagaggtgctgtcccactctctgctgctgctgcataagaaggaggacggcatttggtccaccgacattctgaaagaccagaaggagcctaaaaataaaacctttctgagatgcgaggccaagaactactccggaagattcacatgctggtggctgaccacaatctccacagacctcaccttttccgtgaaatcctctagaggaagcagcgatcctcaaggagtgacatgcggcgctgctacactcagcgccgaaagagtgagaggagataacaaggagtacgagtacagcgtggagtgccaagaggattccgcttgtcccgctgccgaagagtccctccccattgaagtgatggtggacgccgtgcataaactgaaatacgagaattacacctccagcttttttattagagacattattaaacccgacccccccaaaaacctccagctcaagcccctcaaaaatagcagacaagtggaggtgagctgggagtatcccgatacatggagcaccccccacagctatttctccctcaccttctgtgtgcaagtgcaaggcaaatccaagagggagaagaaggatagagtgttcaccgacaaaaccagcgccaccgtcatctgcagaaaaaacgctagcatcagcgtcagagcccaagatagatattactcctccagctggtccgagtgggccagcgtcccttgttccggaggcggaggatccggaggaggaggaagcggcggaggaggctccagaaacctccccgtggctacacccgaccccggaatgtttccttgcctccaccactcccaaaatctgctcagagccgtgtccaacatgctccagaaggccagacaaacactggaattctacccttgcacctccgaggaaatcgatcacgaggacatcaccaaggacaagacaagcaccgtggaagcttgtctgcctctggaactcaccaagaacgagagctgtctgaactctagagaaacaagcttcattacaaacggcagctgtctggccagcagaaagacaagcttcatgatggctctgtgtctgtccagcatctacgaggatctgaagatgtaccaagtggagtttaaaaccatgaacgctaagctgctgatggaccctaagaggcagattttcctcgaccagaacatgctggccgtgattgacgaactgatgcaagctctgaacttcaacagcgagacagtgcctcaaaagtccagcctcgaggagcccgacttctacaagaccaagatcaagctgtgcattctgctgcatgccttcagaatcagagccgtcaccatcgatagagtcatgagctatctgaacgctagcggaagcggagagggaaggggaagcctcctcacatgtggcgatgtggaagaaaaccccggacccgctcaatctctggctctgtctctgctgattctggtgctggctttcggcatccccagaacacaaggcagcgatggcggcgctcaagactgctgtctgaagtacagccagaggaagatccccgccaaggtcgtgaggagctatagaaaacaagagccttctctgggatgttccattcccgccattctgttcctccccagaaagagatcccaagccgaactgtgtgccgaccccaaggagctgtgggtgcagcagctgatgcagcatctggacaagaccccttcccctcagaagcccgctcaaggctgcagaaaagataggggagccagcaagaccggcaagaagggaaagggatccaagggctgtaagagaaccgaaaggagccagacacccaagggacccggctccggcgctaccaatttctctctgctgaagcaagctggcgacgtcgaagaaaatcccggacccgactggacatggaggattctgtttctggtggctgctgccaccggagctcatagcaactgggtgaacgtcattagcgatctgaagaagattgaggatctgatccagtccatgcacatcgacgccacactctataccgagagcgatgtgcaccccagctgcaaggtgaccgccatgaaatgctttctgctggaactgcaagtgatctctctggagtccggcgacgccagcatccatgataccgtggagaatctgatcattctcgccaacaactctctgagcagcaacggcaatgtgacagaatccggctgcaaggagtgtgaagagctcgaggaaaagaatatcaaggagtttctgcagtccttcgtgcacatcgtccaaatgttcatcaatacaagctgagctagcttgactgactgagatacagcgtaccttcagctcacagacatgataagatacattgatgagtttggacaaaccacaactagaatgcagtgaaaaaaatgctttatttgtgaaatttgtgatgctattgctttatttgtaaccattataagctgcaataaacaagttaacaacaacaattgcattcattttatgtttcaggttcagggggaggtgtgggaggttttttaaagcaagtaaaacctctacaaatgtggtagtcgtcagctatcctgcaggatcccaatggcgcgccgagcttggctcgagcatggtcatagctgtttcctgtgtgaaattgttatccgctcacaattccacacaacatacgagccggaagcataaagtgtaaagcctggggtgcctaatgagtgagctaactcacattaattgcgttgcgctcactgcccgctttccagtcgggaaacctgtcgtgccagctgcattaatgaatcggccaacgcgcggggagaggcggtttgcgtattgggcgctgttccgcttcctcgctcactgactcgctgcgctcggtcgttcggctgcggcgagcggtatcagctcactcaaaggcggtaatacggttatccacagaatcaggggataacgcaggaaagaacatgtgagcaaaaggccagcaaaaggccaggaaccgtaaaaaggccgcgttgctggcgtttttccataggctccgcccccctgacgagcatcacaaaaatcgacgctcaagtcagaggtggcgaaacccgacaggactataaagataccaggcgtttccccctggaagctccctcgtgcgctctcctgttccgaccctgccgcttaccggatacctgtccgcctttctcccttcgggaagcgtggcgctttctcatagctcacgctgtaggtatctcagttcggtgtaggtcgttcgctccaagctgggctgtgtgcacgaaccccccgttcagcccgaccgctgcgccttatccggtaactatcgtcttgagtccaacccggtaagacacgacttatcgccactggcagcagccactggtaacaggattagcagagcgaggtatgtaggcggtgctacagagttcttgaagtggtggcctaactacggctacactagaagaacagtatttggtatctgcgctctgctgaagccagttaccttcggaaaaagagttggtagctcttgatccggcaaacaaaccaccgctggtagcggtggtttttttgtttgcaagcagcagattacgcgcagaaaaaaaggatctcaagaagatcctttgatcttttctacggggtctgacgctcagtggaacgaaaactcacgttaagggattttggtcatgagattatcaaaaaggatcttcacctagatccttttaaattaaaaatgaagttttaaatcaatctaaagtatatatgagtaaacttggtctgacagttagaaaaactcatcgagcatcaaatgaaactgcaatttattcatatcaggattatcaataccatatttttgaaaaagccgtttctgtaatgaaggagaaaactcaccgaggcagttccataggatggcaagatcctggtatcggtctgcgattccgactcgtccaacatcaatacaacctattaatttcccctcgtcaaaaataaggttatcaagtgagaaatcaccatgagtgacgactgaatccggtgagaatggcaaaagtttatgcatttctttccagacttgttcaacaggccagccattacgctcgtcatcaaaatcactcgcatcaaccaaaccgttattcattcgtgattgcgcctgagcgaaacgaaatacgcgatcgctgttaaaaggacaattacaaacaggaatcgaatgcaaccggcgcaggaacactgccagcgcatcaacaatattttcacctgaatcaggatattcttctaatacctggaatgctgttttcccagggatcgcagtggtgagtaaccatgcatcatcaggagtacggataaaatgcttgatggtcggaagaggcataaattccgtcagccagtttagtctgaccatctcatctgtaacatcattggcaacgctacctttgccatgtttcagaaacaactctggcgcatcgggcttcccatacaatcgatagattgtcgcacctgattgcccgacattatcgcgagcccatttatacccatataaatcagcatccatgttggaatttaatcgcggcctagagcaagacgtttcccgttgaatatggctcatactcttcctttttcaatattattgaagcatttatcagggttattgtctcatgagcggatacatatttgaatgtatttagaaaaataaacaaataggggttccgcgcacatttccccgaaaagtgccacctgacgtctaagaaaccattattatcatgacattaacctataaaaataggcgtatcacgaggcccttttgtc
